(19) United States
(12) Patent Application Publication
(10) Pub. No.: US 2023/0340528 A1
(43) Pub. Date: Oct. 26, 2023

(54) METHODS OF TREATING CARDIAC DISORDERS AND CONGESTIVE HEART FAILURE AND ADMINISTERING AAV VECTORS

(71) Applicants: Anna TRETIAKOVA, Research Triangle Park, NC (US); Michael W. O’CALLAGHAN, Research Triangle Park, CA (US); Michael L. ROBERTS, Midlothian (GB); Jorge Omar YANEZ-CUNA, Midlothian (GB); Juan Manuel IGLESIAS GONZALEZ, Midlothian (GB); Antonia EVRIPIOTI, Midlothian (GB); Sinclair COOPER, Midlothian (GB); Ferzin SETHNA, Research Triangle Park, NC (US); Roger HAJJAR, Research Triangle Park, NC (US); ASKLEPIOS BIOPHARMACEUTICAL INC., Research Triangle Park, NC (US); SYNPROMICD LTD, Midlothian (GB)

(72) Inventors: Michael W. O’CALLAGHAN, Research Triangle Park, NC (US); Michael L. ROBERTS, Midlothian (GB); Jorg Omar YANEZ-CUNA, Midlothian (GB); Juan Manuel IGLESIAS GONZALEZ, Midlothian (GB); Antonia EVRIPIOTI, Midlothian (GB); Sinclair COOPER, Midlothian (GB); Ferzin SETHNA, Research Triangle Park, NC (US); Roger HAJJAR, Research Triangle Park, NC (US); Anna TRETIAKOVA, Research Triangle Park, NC (US)

(73) Assignee: ASKLEPIOS BIOPHARMACEUTICAL INC., Research Triangle Park, NC (US)

(21) Appl. No.: 18/019,421

(22) PCT Filed: Aug. 5, 2021
(86) PCT No.: PCT/US2021/044650

§ 371 Date: Feb. 2, 2023

Related U.S. Application Data
(60) Provisional application No. 63/214,119, filed on Jun. 23, 2021.
(60) Provisional application No. 63/061,342, filed on Aug. 5, 2020.

(51) Int. Cl. C12N 15/86; A61P 9/04

(52) U.S. Cl. CPC C12N 15/86; A61P 9/04; C12N 2750/14143; C12N 2830/008

(57) ABSTRACT

The present invention relates to methods of administration of rAAV vectors in a single administration method comprising a series of sub-administrations of sub-doses of rAAV vectors. The present invention also relates to rAAV vectors comprising cardiac-specific promoters, cardiac-cell specific promoters, multi-cell cardiac specific promoters, and elements thereof. The invention also relates to rAAV vectors, pharmaceutical compositions and uses thereof in methods for treating cardiovascular disease, heart diseases and heart failure in subjects in need thereof.

### CROSS REFERENCE TO RELATED APPLICATIONS

[0001] This application is a 35 U.S.C. § 371 National Phase Entry Application of international patent application No. PCT/US2021/044650 filed Aug. 5, 2021, which designated the U.S., which claims benefit under 35 U.S.C. § 119(e) of U.S. Provisional Application Nos 63/061,342 filed Aug. 5, 2020; and 63/214,119 filed Jun. 23, 2021, the contents of which are incorporated herein by reference in their entireties.

### SEQUENCE LISTING

[0002] The instant application contains a Sequence Listing which has been submitted electronically in ASCII format and is hereby incorporated by reference in its entirety. Said ASCII copy, created on Aug. 4, 2021, is named 046192-097980WOPT _SL.txt and is 1,059,646 bytes in size.

### FIELD OF THE INVENTION

[0003] The technology herein relates to AAV vectors and regulatory nucleic acid sequences, in particular cardiac-specific promoters, muscle cell specific promoters, and elements thereof for the treatment of cardiac disorders, heart failure, including chronic heart failure (CHF). The technology herein also relates to expression methods of administering AAV vectors for the treatment of cardiac disorders. The technology herein also relates to constructs, vectors, virions, pharmaceutical compositions and cells comprising such promoters for decreasing phosphatase activity to improve β-adrenergic responsiveness, and to methods of their use.

### BACKGROUND OF THE INVENTION

[0004] The following discussion is provided to aid the reader in understanding the disclosure and does not constitute any admission as to the contents or relevance of the prior art.

[0005] Heart failure-defined by the ACC/AHA as the complex clinical syndrome that results from any structural or functional impairment of ventricular filling or ejection of blood-remains one of the most common, costly, and debilitating diseases in the United States. Based on National Health and Nutrition Examination Survey data from 2011 to 2014, an estimated 6.5 million US adults have it, with projections of more than 8 million by 2030. More than 960,000 new cases are thought to occur annually, with a lifetime risk of developing it of roughly 20% to 45%. Heart failure (HF), also called congestive heart failure (CHF) is therefore a disease of epidemic portions in the United States.

[0006] Heart failure is a disorder in which the contractility of the heart muscle decreases, and the heart loses its ability to pump blood efficiently. Heart failure is almost always a chronic, long-term condition, and consumes an inordinate amount of medical intervention and human resource dollars. In particular, the consequences of heart failure to the rest of the body organs can be devastating both in terms of the overall reduction in productive life of the patient, and the expense of treatment. The condition may affect the right side, the left side, or both sides of the heart. As the pumping action of the heart is compromised, blood begins backing up into other areas of the body. Many organs and organ systems begin to suffer cumulative damage from lack of oxygen and nutrients.

[0007] In slightly over one-half of affected individuals, function of the heart is reduced, as demonstrated by a decrease in ejection fraction (heart failure with reduced ejection fraction; HFrEF), and the left ventricle is dilated. New drugs that target pathways critical to progression of HF, along with implantable cardiac defibrillators and resynchronization devices, have been introduced over the past 3 decades. However, both the morbidity and mortality associated with HFrEF remains at unacceptable levels, with as many as 50% of affected individuals dying within 5 years of diagnosis. This has led investigators to evaluate the role of gene therapy in mitigating or curing HFrEF by increasing the amount of a specific protein in the heart

[0008] Protein kinases and their phospho-protein substrates are important in the heart’s pumping action and have been well characterized, however, the protein phosphatases that reverse the increased cardiac contractility are also important. Stemming from a common gene family, the major Ser/Thr phosphatases (type 1, type 2A and type 2B (calcineurin), are highly homologous proteins (40-50%) (Cohen, P., 1990 Phosphoprotein Res; 24:230-5) that play critical roles in the control of cardiac contractility and hypertrophy. Overexpression of the catalytic subunit of protein phosphatase 2A has been shown to decrease cardiac function and lead to a pathologic cardiac hypertrophy (Brewis, N. et al., 2000 Am J Physiol Heart Circ Physiol; 279:H1307-18; Gergs, U. et al., 2004 J Biol Chem.). Furthermore, calcineurin, a calcium dependent phosphatase, induces hypertrophy by its regulation of the NFAT transcription factor activity. 5 Interestingly, inhibition of this phosphatase blocks cardiac hypertrophy in vivo and in vitro (Brewis, N. et al., 2000; Molkentin, J. D., 1998 Cell; 93:215-28).

[0009] In human and experimental heart failure, the activity of the type 1 phosphatase (PP1) associated with the sarcoplasmic reticulum (SR) is significantly increased, suggesting that this may be a contributing factor to depressed function, dilated cardiomyopathy and premature death (Huang, B. et al., 1999 Circ Res; 85:848-55; Sande, J. B., et al., 2002 Cardiovasc Res; 53:382-91; Boknik, P. et al., 2000 Naunyn Schmiedebergs Arch Pharmacol; 362:222-31; Gupta, R. C. et al., 1997 Circulation; 96 (Suppl 1):1-361; Neumann, J. 1997 J Mol Cell Cardiol; 29:265-72; Carr, A. N. et al., 2002, Mol Cell Biol; 22:4124-35).

[0010] It has been previously established that Protein Kinase C alpha (“PKC-α”) activity is increased in the pathological state of heart failure. Inhibiting the activity of Protein Phosphatase-1 (“PP-1”) results in enhanced cardiac contractility (Pathak, A., et al. 2005 Circ Res 15:756′-66).

[0011] There is a need for an effective treatment of, and also, the prevention of heart failure in subjects. Gene therapy has been useful for the treatment of a variety of diseases and disorders. However, it is important that both the delivery of the gene therapy is optimal, as well as the expression of the gene or nucleic acid to a particular tissue and/or cell type.

[0012] Gene therapy has the potential to not only cure genetic disorders, but to also facilitate the long-term non-invasive treatment of acquired and degenerative diseases using a virus. One gene therapy vector is adeno-associated virus (AAV). AAV itself is a non-pathogenic-dependent parvovirus that needs helper viruses for efficient replication. AAV has been utilized as a virus vector for gene therapy because of its safety and simplicity. AAV has a broad host and cell type tropism capable of transducing both dividing and non-dividing cells.

[0013] Following extensive study of the internal mechanisms of gene regulation within the body, research focus has recently shifted to regulation of gene expression by introducing exogenous nucleic acid sequences into cells. This is done conventionally in research and bioprocessing, wherein the nucleic acid sequence of a desired expression product operably liked to a promoter is introduced into a production cell line, often in the form of a vector.

[0014] In the field of gene therapy, this has been of particular interest for genetic disorders such as single gene disorders (or Mendelian disorders) which are caused by the presence of a faulty gene into the cells of a patient. In gene therapy, controlling the expression of the exogenous nucleic acid which has been introduced into the cells is of paramount importance for the health and safety of the patients. The level of an expression product not only needs to be within a therapeutic window but also the expression needs to be within a required tissue or even a specific region within the required tissue for the treatment to be effective. Additionally, expression may need to be restricted to a specific cell type or a multiple cell types in order to avoid side effects. Expression outside the therapeutic window (i.e. lower or higher) or expression outside the therapeutic region, or even outside the specific cell or combination of cells, may not be useful therapeutically or even be deleterious.

[0015] Therefore, there is a need for promoters driving expression in the heart, in particular in the smooth muscle or cardiac muscle of the heart, particularly in specific cell types such as cardiomyocytes and the like. Expression in the heart includes expression in cardiac cells, e.g., cardiomyocytes, as well as smooth muscle cells in the heart.

[0016] Therefore, there is a need for effective treatment of heart failure, including congestive heart failure (CHF), and other heart diseases and disorders. There is also a need for effective administration of viral vectors for treatment of diseases. One or more aspects of the present invention are intended to address one or more of the above-mentioned problems.

### SUMMARY OF THE INVENTION

[0017] The technology described herein relates generally to gene therapy constructs, compositions and methods of administration, for the treatment of cardiovascular conditions, heart disease and heart failure. Also disclosed herein are methods for administration AAV vectors, as well as compositions and methods comprising AAV vectors for the treatment of heart disorders and diseases, including heart failure and congestive heart failure (CHF). In some aspects, AAV vectors for the treatment of heart disorders and diseases include, e.g., an AAV vector encoding a phosphatase inhibitor, for example, for expression of the phosphatase inhibitor in heart cells for the treatment of cardiac disorders, e.g., heart failure. Decreasing phosphatase activity can improve β-adrenergic responsiveness.

[0018] In particular, aspects of the present invention are directed to novel methods of administration and novel rAAV compositions for the treatment of subjects with heart failure, including methods of administration comprising administering to a subject with a classification of heart failure a dose of a rAAV where upon at least 12-months after the administration the classification of the heart failure is improved by at least one, or at least two stages or classification levels. In some embodiments, the methods of administration disclosed herein can be used in combination with other agents, including but not limited to use of immunomodulators and/or vasodilators, as well as rAAV vectors comprising a codon optimized nucleic acid sequence to encode I-1c (a constitutively active truncated inhibitor-1 that inhibits protein phosphatase 1 activity), and/or rAAV vectors comprising novel cardiac-specific muscle promoters. Moreover, the inventors have demonstrated different ways to treat subjects with heart failure, including subjects with non-ischemic cardiomyopathy and ischemic cardiomyopathy that have the ability to significantly improve the subjects’ categorization in a classification system used to assess heart failure. A range of classification systems to categorize the extent of a subjects’ of heart failure can be used and are well known in the art, and includes but are not limited to American Heart Association (AHA), the American College of Cardiology (ACC), Minnesota LIVING WITH HEART FAILURE® Questionnaire (MLHFQ), Kansas City Cardiomyopathy questionnaire (KCCQ), or the 2016 European Society of Cardiology guidelines (ESCG), the Japanese heart failure Society (JHFS) guidelines, The Japanese Circulation Society (JCS) Guidelines, or, the New York Heart Association (NYHA), or modified assessments or combinations or merged assessments thereof.

[0019] For exemplary purposes only and without wishing to be limited to theory, the methods of treating a subject with heart failure as disclosed herein, or administration methods as disclosed herein have been demonstrated to improve a subject’s classification of heart failure, within at 12-months post-administration of a rAAV disclosed herein, from, e.g., a category IV to a category III or less than category III, or for e.g., from a category III to a category II or less than category II, according to a heart failure classification system as disclosed herein. In some embodiments, a system equivalent to the NYHA or the AHA or the ACC classifications are used, or any other comparative heart failure classification system known to a person of ordinary skill in the art.

[0020] Other aspects of the technology described herein relates to novel rAAV vectors encoding a I-1c protein operatively linked to a cardiac specific promoter, or a cardiac muscle specific promoter, or a skeletal muscle promoter specifically active in the cardiac muscle as disclosed herein. In some embodiments, the rAAV vector encoding a I-Ic protein comprises a codon optimized nucleic acid sequence encoding I-1c, e.g., selected from any of SEQ ID NO: 385-412, or a nucleic acid sequence that has at least 85% sequence identity thereto. In some embodiments, the rAAV vector encoding a I1c protein comprise a codon optimized nucleic acid sequence encoding I1c e.g. selected from any of SEQ ID NOS: 385-412, or, a nucleic acid sequence that has at least 85% sequence identity thereto, is operatively linked with CMV promoter, or, a cardiac specific promoter, or a cardiac muscle specific promoter, or a skeletal muscle specific active in cardiac muscle as disclosed herein. In some embodiments, the rAAV vector comprising codon optimized nucleic acid sequence encoding I1c, e.g. selected from any of SEQ ID NOS: 385-412, or a nucleic acid sequence that has 85% sequence identity thereto, further comprise reverse poly A or, ds RNA termination element. In some embodiments, the rAAV vector encoding a I-Ic protein for use in the methods and compositions as disclosed herein comprises a nucleic acid sequence selected from any of SEQ ID NO: 413-440, or a nucleic acid sequence that has at least 85% sequence identity thereto.

[0021] Also provided herein is close ended linear duplex DNA (or, also referred to as closed linear DNA herein) comprising a nucleic acid sequence of any of SEQ ID NO: 357-384. In some embodiments, the rAAV vector lacking bacterial sequences and encoding a I-Ic protein for use in the methods and compositions as disclosed herein is manufactured using a close ended linear duplex DNA of SEQ ID NO: 357-384.

[0022] One aspect of the technology described herein relates to a method to administer a rAAV vector, where the method is a single administration to the subject, where the single total dose administration comprises at least 2, or 3, or 4, or 5 or more sub-doses within the single administration. That is, stated differently, in some embodiments, the method comprises administering a rAAV vector to the subject in a single administration, where the single total dose administration comprises the administration of rAAV from least 2, or 3, or 4, or 5 or more vials, in which the total rAAV dose us administered from each vial over a time period between 1-5 minutes, or more than 5 minutes. In some embodiments, the rAAV vector is selected from the group consisting of AAV2, AAV6, AAV8, AAV9, AAV2i8, rh10, AAV2.5 and AAV2G9. In certain embodiments, the rAAV vector is AAV2i8 (also referred to as BNP116). In yet another embodiment, the rAAV vector comprises a VP1, a VP2, and/or VP3 capsid protein from a serotype selected from the group of AAV serotypes listed in table 11, which also lists the capsid protein sequences known in the art.

[0023] In some embodiments, the methods relate to administration of a rAAV vector to the heart of a subject, e.g., a human subject. In some embodiments, the rAAV vector comprises a cardiac-specific promoter, for example, an exemplary cardiac-specific promoter selected from any of these disclosed in Table 2A herein, or a functional variant or functional fragment thereof, or any cardiac specific promoter (CSP) selected from Tables 2 and 3 herein. In some embodiments, the rAAV vector is administered according to the disclosed methods for the treatment of cardiovascular conditions, heart failure or a heart disease or disorder. In some embodiments, the rAAV vector administered according to the methods disclosed herein is a rAAV vector comprising a nucleic acid encoding a therapeutic agent for treatment of heart failure, wherein the nucleic acid is operatively linked to a cardiac-specific promoter as disclosed in Table 2A herein, or a functional variant or functional fragment thereof, or any CSP selected from Tables 2 and 3 herein.

[0024] In some embodiments, the technology described herein relates to a method to co-administer a rAAV vector with an immune modulator, as disclosed herein.

[0025] Another aspect of the technology described herein relates to gene therapy constructs, methods and composition, for the treatment of heart failure. More particularly, the technology relates to adeno-associated (AAV) virions configured for delivering an inhibitor of protein phosphate 1 (PP1) to a subject, and more particularly for delivering a PP1 inhibitor for expression in the heart of a subject.

[0026] Accordingly, in one aspect, this disclosure features a method that includes administering, into heart cells, e.g., cardiomyocytes, a rAAV vector expressing an agent that modulates phosphatase activity, e.g., type 1 phosphatase activity, in the cells. The heart cells can be in vitro or in vivo. For example, the heart cells can be in a heart of a subject. The method can be used to treat a subject, e.g., a subject having a cardiac disorder, e.g., heart failure. Typically, the subject is a mammal, e.g., a human or non-human mammal. Type 1 phosphatases include, but are not limited to, PP1cα, PP1cβ, PP1cδ and PP1cγ.

[0027] In one embodiment, the agent is a nucleic acid that comprises a sequence encoding a protein that inhibits phosphatase activity, e.g., type 1 phosphatase activity. The rAAV vector can be administered in an amount effective to decrease phosphatase activity and/or increase β-adrenergic responsiveness in the treated cells.

[0028] In some embodiments, the rAAV vector expresses a nucleic acid that increases expression of an endogenous nucleic acid that encodes a protein that inhibits phosphatase activity. For example, the nucleic acid can include a sequence that encodes a transcription factor, e.g., an engineered transcription factor such as a chimeric zinc finger protein. In still another example, the nucleic acid is a regulatory sequence that integrates in or near the endogenous nucleic acid that encodes a protein that inhibits phosphatase activity, e.g., in or near a gene encoding phosphatase inhibitor-1 (“I-1”).

[0029] In still another embodiment, the rAAV vector expresses a nucleic acid that can provide a nucleic acid modulator of gene expression. For example, the nucleic acid can be a nucleic acid that can express such a nucleic acid modulator, e.g., a dsRNA (e.g., siRNA), an anti-sense RNA, or a ribozyme.

[0030] In one embodiment, the rAAV vector disclosed herein comprises, in its genome: 5′ and 3′ AAV inverted terminal repeats (ITR) sequences, and located between the 5′ and 3′ ITRs, a heterologous nucleic acid sequence encoding a protein phosphate 1 (PP1) inhibitor, wherein the heterologous nucleic acid is operatively linked to a cardiac-specific promoter (CSP). In some embodiments, the PP1 inhibitor is Inhibitor-1 (I-1) or a functional variant thereof. In some embodiments, the cardiac-specific promoter is a synthetic cardiac specific promoter selected from any promoter listed in Table 2A herein, or a functional variant or functional fragment thereof, or any CSP selected from Tables 2 and 3 herein.

[0031] In one embodiment, the rAAV is administered by an injection, e.g., a direct injection into the heart, e.g., a direct injection into the left ventricle surface. In some embodiments, the rAAV is administered into a lumen of the circulatory system, e.g., into a chamber or the lumen of the heart or a blood vessel of the heart of a subject. For example, the pericardium can be opened and the rAAV can be injected into the heart, e.g., using a syringe and a catheter. The rAAV can be administered into the lumen of the aorta, e.g., the aortic root, introduced into the coronary ostia or introduced into the lumen of the heart. The rAAV can be administered into a coronary artery. It is also possible to restrict blood flow to increase resident time in the blood vessel, e.g., in the coronary artery, e.g., using an antegrade or retrograde blockade. In some embodiments, the rAAV is administered using syringe fitted with injection pump or, infusion pump. In some embodiments, the rAAV is administered using manually controlled syringe.

[0032] In one embodiment, the rAAV vector as disclosed herein is introduced by a percutaneous injection, e.g., retrograde from the femoral artery retrograde to the coronary arteries. In still another embodiment, the rAAV vector as disclosed herein is introduced, e.g., using a stent. For example, the rAAV vector as disclosed herein is coated on the stent and the stent is inserted into a blood vessel, such as a coronary artery, peripheral blood vessel, or cerebral artery.

[0033] In one embodiment, introducing the rAAV vector as disclosed herein includes restricting blood flow through coronary vessels, e.g., partially or completely, introducing the viral delivery system into the lumen of the coronary artery, and allowing the heart to pump, while the coronary vein outflow of blood is restricted. Restricting blood flow through coronary vessels can be performed, e.g., by inflation of at least one, two, or three angioplasty balloons. Restricting blood flow through coronary vessels can last, e.g., for at least one, two, three, or four minutes. Introduction of the viral particle into the coronary artery can be performed, e.g., by an antegrade injection through the lumen of an angioplasty balloon. The restricted coronary vessels can be: the left anterior descending artery (LAD), the distal circumflex artery (LCX), the great coronary vein (GCV), the middle cardiac vein (MCV), or the anterior interventricular vein (AIV). Introduction of the viral particle can be performed after ischemic preconditioning of the coronary vessels, e.g., by restricting blood flow by e.g., inflating at least one, two, or three angioplasty balloons. Ischemic preconditioning of the coronary vessels can last for at least one, two, three, or four minutes.

[0034] In one embodiment, introducing the rAAV vector as disclosed herein includes restricting the aortic flow of blood out of the heart, e.g., partially or completely, introducing the viral delivery system into the lumen of the circulatory system, and allowing the heart to pump, e.g., against a closed system (isovolumically), while the aortic outflow of blood is restricted. Restricting the aortic flow of blood out of the heart can be performed by redirecting blood flow to the coronary arteries, e.g., to the pulmonary artery. Restricting the aortic flow of blood can be accomplished by clamping, e.g., clamping a pulmonary artery. Introducing the viral particle can be performed e.g., with the use of a catheter or e.g., by direct injection. Introducing the viral particle can be performed by a delivery into the aortic root.

[0035] A cardiac specific promoter can be expressed in other cells. However, it has a higher degree of expression in the cardiac cells such as cardiomyocytes in the heart, as well as non-cardiomyocyte cells or located in the heart. For example, a cardiac-specific promoter expresses a gene at least 25%, or at least 35%, or at least 45%, or at least 55%, or at least 65%, or at least 75%, or at least 80%, or at least 85%, or at least 90%, or at least 95%, or any integer between 25%-95% higher in cells located in the heart, including cardiomyocyte and non-cardiomyocyte cells located in the heart as compared to cells located outside the heart.

[0036] Functional variants are defined herein below. Suitably, the synthetic cardiac-specific promoter may comprise a sequence which is at least 60%, 65%, 70%, 75%, 80%, 90%, 95%, 96%, 97%, 98% or 99% identical to any one of SEQ ID NOs: 3-64. Suitably the synthetic cardiac-specific promoter may comprise a sequence which is at least 60%, 65%, 70%, 75%, 80%, 90%, 95%, 96%, 97%, 98% or 99% identical to any one of SEQ ID NO: 3-64, operably linked to a sequence which is at least 60%, 65%, 70%, 75%, 80%, 90%, 95%, 96%, 97%, 98% or 99% identical to any one of SEQ ID NOs: 3-32.

[0037] In one embodiment, there is provided a synthetic cardiac-specific promoter comprising or consisting of at least one of the following cis-regulatory elements (CREs) disclosed herein.

[0038] One aspect of the technology disclosed herein relates to a method of treating a patient having a heart failure, comprising: administering into heart cells of the patient, at least one total dose of a rAAV vector comprising a nucleic acid sequence encoding a phosphatase inhibitor protein that inhibits phosphatase activity, wherein, at least one dose of the rAAV is selected from a total dose-range of about 10¹³vg to about 10¹⁵vg, and wherein, six months post-administration NT-proBNP level in serum of the patient is below 900 pg/ml.

[0039] Another aspect of the technology described herein relates to a method of treating a patient having a heart failure, comprising: administering into heart cells of the patient, at least one total dose of a rAAV vector comprising (i) a nucleic acid sequence encoding a phosphatase inhibitor protein that inhibits phosphatase activity, (ii) a synthetic promoter, operatively linked to the phosphatase inhibitor (I-1) protein.

[0040] Another aspect of the technology described herein relates to a method of treating a patient having a cardiovascular condition or a heart disease, comprising: administering into heart cells of the patient, at least one total dose of a rAAV vector comprising a therapeutic nucleic acid operatively linked to a cardiac-specific promoter selected from Table 2A or a variant thereof, or a muscle-specific promoter active in cardiac and skeletal muscle selected from Table 5A or a variant thereof, wherein the therapeutic nucleic acid is RNA or DNA, and wherein the therapeutic nucleic acid expresses a therapeutic protein selected from Table 18A or 18B.

[0041] Another aspect of the technology described herein relates to a method of treating a patient having congestive heart failure, comprising: administering to a patient, at least one dose of a rAAV vector, wherein the rAAV vector is AAV2i8 and comprises a nucleic acid encoding phosphatase inhibitor 1 (I-1) operatively linked to a promoter selected from: a CMV promoter, a cardiac-specific promoter selected from Table 2A or a variant thereof, or a muscle-specific promoter active in cardiac and skeletal muscle selected from Table 5A or a variant thereof.

[0042] In all aspect of the methods and compositions as disclosed herein, in some embodiments, the rAAV vector comprises a nucleic acid sequence encoding a polypeptide comprising amino acids 1-65 of SEQ ID NO: 2, wherein threonine at position 35 of SEQ ID NO: 1 is replaced with aspartic acid (T35D). In some embodiments, the nucleic acid sequence is a codon optimized nucleic acid sequence selected from any of SEQ ID NO: 385-412.

[0043] Also provided are closed linear DNA constructs comprising a nucleic acid sequence of any of SEQ ID NO: 385-412. The closed linear DNA can be used in methods for making rAAV that lack bacterial DNA sequences. Thus, also provided herein are pharmaceutical compositions for treatment of heart failure that comprise rAAV encoding constitutively active I-1c, wherein the rAAV compositions lack bacterial nucleic acid sequences.

[0044] In all aspect of the methods and compositions as disclosed herein, in some embodiments, the rAAV vector further comprises CMV promoter or a synthetic promoter, operatively linked to the phosphatase inhibitor protein. In some embodiments, the synthetic promoter is a cardiac-specific promoter selected from Table 2A or a variant thereof, or a muscle-specific promoter active in cardiac and skeletal muscle selected from Table 5A or a variant thereof. In some embodiments, the synthetic promoter causes expression of the therapeutic nucleic acid or phosphatase inhibitor protein preferentially in smooth muscle cells. In some embodiments, the synthetic promoter causes expression of the therapeutic nucleic acid or phosphatase inhibitor protein preferentially in cardiac cells. In some embodiments, the expression of the therapeutic nucleic acid or phosphatase inhibitor protein by the cardiac- or muscle-specific promoter is equivalent to, or greater than, the expression caused by CMV promoter.

[0045] In all aspect of the methods and compositions as disclosed herein, in some embodiments, the total dose is administered over a period of time of about 20 minutes to about 30 minute. In some embodiments, the total dose is performed in sub-doses, wherein each sub-dose is administered over a period of time of 1-5 minutes, for example, the administration of the total dose is performed in five sub-doses, each sub-dose is administered over a period of time of 1-5 minutes, where, for example, the five sub-doses are administered over a period of about 20 minutes to about 30 minutes.

[0046] In all aspect of the methods and compositions as disclosed herein, in some embodiments, the rAAV is selected from the group consisting of AAV2, AAV6, AAV8, AAV9, AAV2i8, rh10, AAV2.5 and AAV2G9. In some embodiments, the rAAV is AAV2i8 or AAV9. In some embodiments, the rAAV is selected from any AAV serotypes disclosed in Table 11.

[0047] In all aspect of the methods and compositions as disclosed herein, in some embodiments, the at least one total dose of the rAAV is 10¹³ vg, 3×10¹³ vg, 10¹⁴ vg, 3×10¹⁴ vg, or, 10¹⁵ vg. In some embodiments, the at least one total dose of the rAAV is selected from a dose-range of about 10¹³vg to about 10¹⁵vg.

[0048] In all aspect of the methods and compositions as disclosed herein, in some embodiments, at least about six-months post administration of the rAAV dose, NT-proBNP level in serum of the patient is measured and is below 900 pg/ml.

[0049] In all aspect of the methods and compositions as disclosed herein, in some embodiments, the method further comprises administering an immune modulator. In some embodiments, the administration further comprises nitroprusside or nitroglycerin. In all aspect of the methods and compositions as disclosed herein, the administration is into the lumen of the coronary artery of the heart of the patient or systemic administration.

[0050] Also provided herein is a close ended linear duplex DNA (also referred to as closed linear DNA in the application) of any of SEQ ID NO: 357-384 that is used to generate rAAV of the present invention.

[0051] In all aspects of the methods and compositions as disclosed herein, the methods are useful to treat heart failure, including congestive heart failure (CHF), wherein the HF or CHF is selected from any of: left ventricular remodeling, peripheral arterial occlusive disease (PAOD), dilated cardiomyopathy (DCM) including idiopathic dilated cardiomyopathy (IDCM), coronary artery disease, ischemia, arrhythmia, myocardial infarction (MI), abnormal heart contractility, acute (decompensated) heart failure (AHF), abnormal Ca2+ metabolism, myocardial ischemia, atherosclerosis, cardiomyopathy, idiopathic cardiomyopathy, cardiac arrhythmias, muscular dystrophy, muscle mass abnormality, muscle degeneration, infective myocarditis, drug- or toxin-induced muscle abnormalities, hypersensitivity myocarditis, an autoimmune endocarditis and congenital heart disease and pulmonary heart hypertension.

[0052] In all aspects of the methods and compositions as disclosed herein, the methods are useful to treat cardiomyopathy.

[0053] In all aspects of the methods and compositions as disclosed herein, the methods are useful to treat non-ischemic cardiomyopathy, or non-ischemic heart failure.

[0054] In all aspects of the methods and compositions as disclosed herein, the methods are useful to treat ischemic cardiomyopathy, or non-ischemic heart failure.

[0055] One aspect of the technology described herein relates to a method of treating a patient having a heart failure, comprising: (i) administering into heart cells of the patient having a classification of congestive heart failure (CHF), at least one total dose of a rAAV vector comprising a nucleic acid sequence encoding a phosphatase inhibitor (I-1) protein that inhibits phosphatase activity, where at least one dose of the rAAV is selected from a total dose-range of about 10¹³vg to about 10¹⁵vg, and where. at least twelve months post-administration, there is an improvement in the classification of congestive heart failure.

[0056] In all aspects of the methods disclosed herein, the classification of heart failure is based upon a classification system used by the American Heart Association (AHA), the American College of Cardiology (ACC), Minnesota LIVING WITH HEART FAILURE® Questionnaire (MLHFQ), Kansas City Cardiomyopathy questionnaire (KCCQ), or the 2016 European Society of Cardiology guidelines (ESCG), the Japanese heart failure Society (JHFS) guidelines, The Japanese Circulation Society (JCS) Guidelines, or, the New York Heart Association (NYHA), or an equivalent classification system thereof. In some embodiments, there is an improvement in the classification of at least one level, or at least two levels, after 12 months after administration of the rAAV. In some embodiments, there is an improvement in the classification of at least one level, or two levels within six months after administration of the rAAV.

[0057] In all aspects of the methods disclosed herein, the classification of heart failure is NYHA and the level of classification is selected from the group consisting of: Class I, Class II, Class III, and Class IV. In some embodiments, the classification system is the American College of Cardiology/American Heart Association (ACC/AHA) complementary staging system and the level of classification is selected from the group consisting of: Stages A, Stage B, Stage C, Stage D. In some embodiments, the classification system is KCCQ and the level of classification is a KQQC overall summary score range selected from the group consisting of: KCCQ fair to excellent scores of 50 to 100, very poor to fair scores of 0 to 49, good to excellent scores of 75 to 100, and very poor to good scores of 0 to 74.

[0058] Another aspect of the technology described herein relates to a method of treating a patient having cardiomyopathy, comprising administering into heart cells of the patient at least one total dose of a rAAV vector comprising a nucleic acid sequence encoding a phosphatase inhibitor (I-1) protein that inhibits phosphatase activity, where at least one dose of the rAAV is selected from a total dose-range of about 10¹³vg to about 10¹⁵vg, and where, at least twelve months post-administration, there is an improvement in the at least one parameter from a baseline level in the patient, where the at least one parameter is selected from the group consisting essentially of: (i) ejection fraction (EF), (ii) end systolic volume (ESV), (iii) cardiac contractility, selected from ejection fraction (EF) and fractional shortening (FS); (iv) cardiac volumes selected from any of: end diastolic volume (DV) and end systolic volume (ESV), (v) functional criteria, selected from any of: a 6-minute walk test (6MWT), exercise and VO2max; (vi) BNP level, Pro-BNP level, (vii) biomarker level, wherein the biomarker level is selected from the group of: troponin, serum creatinine, cystatin-C, or hepatic transaminases, (viii) Patient-reported outcomes (PROs), such as reduced symptoms, health-related quality of life (HRQOL), or patient perceived health status, and (ix)decrease in any of: mortality risk due to heart failure, reduced hospitalization due to heart failure symptoms, or therapeutic intervention for treatment of heart failure.

[0059] In all aspects of the methods disclosed herein, there is an improvement of at least 2, or at least 3, or at least 4, or at least 5 parameters at least 12 months after administration. In some embodiments, there is an improvement of at least 2, or at least 3, or at least 4, or at least 5 parameters at least 6 months after administration. In some embodiments, the improvement is selected from any of: (a) at least a 5% or more increase in ejection fraction from baseline, (b) at least a 10% decrease, or at least a 20 ml decrease in end systolic volume from baseline, (c) at least a 50-meter increase in 6-minute walk test from baseline, (d) at least a 40% decrease in BNP levels (pg/ml) in the blood from baseline, (e) at least a 35% decrease in pro-BNP levels (pg/ml) in the blood from baseline, (f) at least a 10% reduction in a biomarker selected from: troponin, serum creatinine, cystatin-C, or hepatic transaminases from a baseline level of the same biomarker, (g) at least a 1.5 ml/kg/min increase in myocardial oxygen consumption (MVO2) from baseline, or, (h) a discharge from hospital due to improved HF symptoms, or a reduced intervention selected from a decrease in the use of any of: inotropes, vasodilators, diuretcis due to improved HF symptoms in the subject.

[0060] In all aspects of the methods and compositions disclosed herein, the rAAV vector further comprises CMV promoter or a synthetic promoter, operatively linked to the phosphatase inhibitor protein. In all aspects of the methods and compositons disclosed herein, a total dose or rAAV is administered as any of the following administration methods: (a) over a period of time of about 20 minutes to about 30 minutes, (b) administered in a series of sub-doses, wherein each sub-dose is administered over a period of time of about 1 minute to about 5 minutes or (c) administered in a series of five sub-doses, each sub-dose is administered over a period of time of about 1 minute to about5 minutes, and wherein the five sub-doses are administered over a period of about 20 minutes to about 30 minutes.

[0061] In all aspects of the methods and compositons disclosed herein, the rAAV vector comprises a capsid that detargets the liver - that is, the rAAV preferentially targets tissues other than the liver. In some embodiments of all aspects described herein, the rAAV can preferentially target muscle cells, including but not limited to, cardiac muscle and cardiomyocytes. In all aspects of the methods and compositions disclosed herein, the rAAV is selected from the group consisting of: AAV1, AAV2, AAV6, AAV8, AAV9, AAV2i8, rh10, AAV2.5 and AAV2G9, or any rAAV selected from Table 11. In some embodiments, the rAAV vector is AAV2i8.

[0062] In all aspects of the methods and compositions disclosed herein, the rAAV vector is administered in at least one total dose of the rAAV is 10¹³ vg, 3×10¹³ vg, 10¹⁴ vg, 3×10¹⁴ vg, or, 10¹⁵ vg.

[0063] In all aspects of the methods and compositions as disclosed herein for the treatment of cardiomyopathy, the rAAV vector encodes a protein selected from any of the proteins listed in Table 18A or 18B. In all aspects of the methods and compositions as disclosed herein for the treatment of cardiomyopathy, the rAAV vector comprises a nucleic acid sequence encoding a phosphatase inhibitor (I-1) protein, for example a constitutively active protein (I-1c). In all aspects of the methods and compositions disclosed herein, the I-1c is selected from any of: (a) a polypeptide comprises at least amino acid residues 1-54 of SEQ ID NO: 1, wherein SEQ ID NO: 1 is truncated at the C-terminus at amino acid 70, 67, 66, 65, or 61, or 54, and where the there is an aspartic acid at position 35 (T35D), (b) a polypeptide comprising amino acids 1-54 of SEQ ID NO:1 or a functional fragment thereof, wherein the functional fragment has at least 85% sequence identity to amino acid residues 1-54 of SEQ ID NO: 1, or truncated at the C-terminus at amino acid 70, 67, 66, 65, or 61, or 54, and where the there is an aspartic acid at position 35 (T35D), or (c) a polypeptide selected from any of: SEQ ID NOS: 507 or 527-532 or a functional equivalent thereof having at least 85% sequence identity to amino acid residues of any of SEQ ID NOS: 507 or 527-532.

[0064] In all aspects of the methods and compositions disclosed herein, the rAAV genome comprises nucleic acid sequence selected from the group consisting of: SEQ ID NO: 413-441. In some embodiments, the nucleic acid sequence encoding the I-1 polypeptide is selected from: (a) a nucleic acid sequence encoding a polypeptide comprising amino acids 1-65 of SEQ ID NO: 1, wherein threonine (T) at position 35 of SEQ ID NO: 1 is replaced with an amino acid that is not T, (b) a nucleic acid sequence encoding a polypeptide comprising amino acids 1-65 of SEQ ID NO: 1, wherein threonine (T) at position 35 of SEQ ID NO: 1 is replaced with an acid amino acid selected from any of: aspartic acid (D), glutamic acid (E), asparagine (N), glutamine (Q), or (c) a nucleic acid sequence encoding a polypeptide comprising amino acids 1-65 of SEQ ID NO: 1, wherein threonine (T) at position 35 of SEQ ID NO: 1 is replaced with aspartic acid (D), or a conservative amino acid of aspartic acid.

[0065] In all aspects of the methods and compositions disclosed herein, the nucleic acid sequence encoding the I-1 protein is a codon optimized nucleic acid sequence, for example, but not limited to, a nucleic acid sequence encoding the I-1 protein is selected from any of SEQ ID NO: 385-412, or a nucleic acid sequence having at least 80% sequence identity to SEQ ID NO: 385-412.

[0066] In all aspects of the technology described herein, the methods and compositions disclosed herein can be used to treat a subject with cardiomyopathy, wherein the subject with cardiomyopathy has non-ischemic heart failure and/or non-ischemic cardiomyopathy, including but not limited to, acquired cardiomyopathy, cardiomyopathy acquired as a result of an infection, or toxin, etc., or a congenital cardiomyopathy or a genetic disorder with a cardiac manifestation. In some embodiments, a subject with a congenital cardiomyopathy or a genetic disorder with a cardiac manifestation has a disease or disorder selected from the group consisting of: Arrhythmogenic right ventricular cardiomyopathy, Atrial myxoma, familial, Atrial septal defect ostium primum, Atrial septal defect sinus venosus, Barth syndrome, muscular dystrophy, Buerger disease, Cardioencephalomyopathy, Chromosome 1p36 deletion syndrome, Congenital generalized lipodystrophy type 4, Congenital heart block, Dilated cardiomyopathy, Duchenne muscular dystrophy (DMD), Fabry disease, Familial atrial fibrillation, Familial dilated cardiomyopathy, Familial hypertrophic cardiomyopathy, Familial progressive cardiac conduction defect, Familial thoracic aortic aneurysm and aortic dissection, Fibromuscular dysplasia, Friedreich ataxia, Gaucher disease, Glycogen storage disease (types 2, 3 or 4), His bundle tachycardia, Hurler syndrome, Hypoplastic left heart syndrome, Infantile histiocytoid cardiomyopathy, Intracranial arteriovenous malformation, Isobutyryl-CoA dehydrogenase deficiency, Kallikrein hypertension, Kawasaki disease, Kearns-Sayre syndrome, Left ventricular noncompaction, Limb-girdle muscular dystrophy (types 1B, 2E, 2F, 2M, 2C, 2D), Limited systemic sclerosis, Long QT syndrome 1, Lymphedema and cerebral arteriovenous anomaly, Lymphocytic vasculitis, Microcephaly-cardiomyopathy; Mitochondrial encephalomyopathy lactic acidosis and stroke-like episodes, Mitochondrial trifunctional protein deficiency, Myotonic dystrophy type 1, Neonatal stroke, Noonan syndromes 1 -, 2-, 3-, 4-, 5- and 6, Peripartum cardiomyopathy, Peters plus syndrome, PGM1-CDG, PHACE syndrome, Phospholamban Arg 14 Deletion, Postural orthostatic tachycardia syndrome, Primary carnitine deficiency, Progressive familial heart block (types 1A, 1B and 2), Pseudohypoaldosteronism type 2, Pulmonary arterial hypertension, Pulmonary atresia with intact ventricular septum, Pulmonary atresia with ventricular septal defect, Pulmonary valve stenosis, Pulmonary vein stenosis, Pulmonic stenosis, Renoprival hypertension, Retinal arterial macroaneurysm with supravalvular pulmonic stenosis, Right ventricle hypoplasia, Sarcoidosis, Sengers syndrome, Situs inversus, Sudden Arrhythmia Death Syndrome, Supravalvular aortic stenosis, Swyer syndrome, TANGO2-Related Metabolic Encephalopathy and Arrhythmias, TARP syndrome, Tetralogy of Fallot, Timothy syndrome, Tricuspid atresia, Vici syndrome, VLCAD deficiency and Williams syndrome.

[0067] In all aspects of the technology described herein, the methods and compositions disclosed herein can be used to treat a subject with cardiomyopathy, wherein the subject with cardiomyopathy has an ischemic cardiomyopathy.

[0068] In all aspects of the technology described herein, the methods and compositions disclosed herein can be used to treat a subject with cardiomyopathy, where the subject with cardiomyopathy has heart failure. In such an embodiment, the subject with heart failure has a classification that is equivalent to class III or above in the New York Heart Association (NYHA) classification system. In some embodiments, the subject with heart failure has a cardiovascular disease or heart disease is selected from any of: congestive heart failure (CHF), left ventricular remodeling, peripheral arterial occlusive disease (PAOD), dilated cardiomyopathy (DCM) including idiopathic dilated cardiomyopathy (IDCM), coronary artery disease, ischemia, arrhythmia, myocardial infarction (MI), abnormal heart contractility, acute (decompensated) heart failure (AHF), abnormal Ca2+ metabolism, myocardial ischemia, atherosclerosis, cardiomyopathy, idiopathic cardiomyopathy, genetic disorder induced cardiomyopathy, cardiac arrhythmias, muscular dystrophy, muscle mass abnormality, muscle degeneration, infective myocarditis, drug- or toxin-induced muscle abnormalities, hypersensitivity myocarditis, an autoimmune endocarditis and congenital heart disease and pulmonary heart hypertension.

[0069] In all aspects of the technology described herein, the methods and compositions disclosed herein can be used to treat a subject with cardiomyopathy, where the subject with cardiomyopathy has reduced ejection fraction (rEF or HFrEF), or, preserved ejection fraction (HFpEF).

[0070] In some embodiments in the methods to treat a subject with cardiomyopathy and where the subject has heart failure, at least twelve months post-administration of the rAAV, there is an improvement of at least one class in a classification of heart failure from a baseline level, wherein the classification of heart failure is assessed by at least one of the following: (a) a classification system used by the American Heart Association (AHA), the American College of Cardiology (ACC), the 2016 European Society of Cardiology guidelines (ESCG), the Japanese heart failure Society (JHFS) guidelines, The Japanese Circulation Society (JCS) Guidelines, or, the New York Heart Association (NYHA); or equivalent thereof, or (b) a health-related quality of life (HRQL) questionnaire selected from the group consisting from any of: Minnesota LIVING WITH HEART FAILURE® Questionnaire (MLHFQ), or Kansas City Cardiomyopathy questionnaire (KCCQ), Chronic Heart Failure Questionnaire (CHFQ), Quality of Life Questionnaire for Severe Heart Failure (QLQ-SHF), Left Ventricular Dysfunction (LVD-36) questionnaire, and the Left Ventricular Disease Questionnaire (LVDQ).

[0071] In all aspects of the methods disclosed herein, an improvement of a classification of HF is an improvement of at least 2, or at least 3, or at least 4, or at least 5 parameters at least 12 months after administration. In some embodiments, there is an improvement of at least 2, or at least 3, or at least 4, or at least 5 parameters at least 6 months after administration. In some embodiments, there is an improvement in the classification of at least one level, or at least two levels, within six months after administration of the rAAV. In some embodiments, there is an improvement of at least a 10 point decrease in quality of life MLWHFQ or KCCQ from the baseline level.

[0072] In all aspects of the methods and compositions disclosed herein, the subject is administered a vasodilator concurrent with and/or, before, and/or, after the administration of the at least one total dose of a rAAV vector. In all aspects of the methods and compositions disclosed herein, the subject is administered an immune modulator concurrent with, or before, or after the administration of the at least one total dose of a rAAV vector.

[0073] Another aspect of the technology described herein relates to a pharmaceutical composition comprising an AAV vector that comprises a codon optimized I-Ic nucleic sequence selected from any of SEQ ID NO: 385-412, or nucleic acid sequence having at least 80% sequence identity to SEQ ID NOS: 385-412. In some embodiments, the codon optimized nucleic acid sequence is operably linked to a CMV promoter or a synthetic promoter, for example a cardiac-specific promoter selected from any of Table 2A, or a muscle-specific promoter active in cardiac and skeletal muscle, e.g., a promoter selected from Table 5A or 13A, or a variant thereof. In some embodiments, the pharmaceutical composition comprises a nucleic acid sequence selected from the group consisting of: SEQ ID NO: 41-42, or a nucleic acid sequence having at least 80% sequence identity to SEQ ID NOS: 385-412. In some embodiments, the pharmaceutical composition can be used in a method to treat a subject with cardiomyopathy, including non-ischemic cardiomyopathy or ischemic cardiomyopathy, as disclosed herein. In some embodiments, the pharmaceutical composition can be used in a method to treat a subject with heart failure as disclosed herein.

[0074] Another aspect of the technology described herein relates to an adeno-associated virus (AAV) vector comprising a nucleic acid sequence encoding a Phosphatase inhibitor (I-1) polypeptide operably linked to a promoter selected from any of: (a) a cardiac-specific promoter selected from Table 2A or a variant thereof, or (b) a muscle-specific promoter active in cardiac and skeletal muscle, or a variant thereof, or (c) any promoter when a cardiac tissue specific enhancer is present. In some embodiments of the AAV vector, the muscle-specific promoter active in cardiac and skeletal muscle is selected from Table 5A or Table 13A or a variant thereof.

[0075] In all aspects of the rAAV composition and methods of using to treat a subject with cardiomyopathy and/or heart failure as disclosed herein, the AAV is selected from the group consisting of adeno-associated virus-1 (AAV1), AAV2, AAV3, AAV4, AAV5, AAV6, AAV7, AAV8, AAV9 and AAV2i8. In some embodiments, the AAV comprises a capsid that detargets the liver - that is, the capsid targets the rAAV to a tissue other than the liver in vivo. In some embodiments, the rAAV vector is AAV2i8.

[0076] In all aspects of the rAAV compositions and methods as disclosed herein, the phosphatase inhibitor (I-1) polypeptide is a constitutively active protein (I-1c), for example, where the I-1c is selected from any of: (a) a polypeptide comprises at least amino acid residues 1-65 of SEQ ID NO: 1 or a functional equivalent thereof; (b) a polypeptide comprising at least amino acids 1-54 of SEQ ID NO: 1, wherein the polypeptide is truncated at a C-terminus at amino acid selected from residue 70, 67, 66, 65, or 61, or 54, and where the there is an aspartic acid at position 35 (T35D), (c) a polypeptide comprising amino acids 1-65 of SEQ ID NO:1 or a functional equivalent thereof having at least 85% sequence identity to amino acid residues 1-65 of SEQ ID NO: 1, or, (d) a polypeptide selected from any of: SEQ ID NOS: 507 or 527-532 or a functional equivalent thereof having at least 85% sequence identity to amino acid residues of any of SEQ ID NOS: 507 or 527-532. In some embodiments of all aspects disclosed herein, the AAV vector comprises a nucleic acid sequence encoding a I-1 polypeptide is selected from: (a) a nucleic acid sequence encoding a polypeptide comprising amino acids 1-65 of SEQ ID NO: 1, wherein threonine (T) at position 35 of SEQ ID NO: 1 is replaced with an amino acid that is not T, (b) a nucleic acid sequence encoding a polypeptide comprising amino acids 1-65 of SEQ ID NO: 1, wherein threonine (T) at position 35 of SEQ ID NO: 1 is replaced with an acid amino acid selected from any of: aspartic acid (D), glutamic acid (E), asparagine (N), glutamine (Q), (c) a nucleic acid sequence encoding a polypeptide comprising amino acids 1-65 of SEQ ID NO: 1, wherein threonine (T) at position 35 of SEQ ID NO: 1 is replaced with aspartic acid (D), or a conservative amino acid of aspartic acid.

[0077] In some embodiments of all aspects disclosed herein, the rAAV encodes a I-1c polypeptide selected from: amino acids 1-54 of SEQ ID NO: 1, amino acids 1-61 of SEQ ID NO: 1, amino acids 1-65 of SEQ ID NO: 1, amino acids 1-66 of SEQ ID NO: 1, amino acids 1-67 of SEQ ID NO: amino acids 1 or 1-77 of SEQ ID NO: 2, or a functional variant thereof, wherein the threonine at position 35 of SEQ ID NO: 1 is replaced with an aspartate acid (T35D), or a conservative amino acid of aspartate.

[0078] In some embodiments of all aspects disclosed herein, the nucleic acid sequence encoding the I-1 polypeptide is a codon optimized nucleic acid sequence, for example, where the codon optimized nucleic acid sequence has reduced CpG content or reduced CpG islands as compared to the wild-type reference sequence of a SEQ ID NO: 1, or a fragment thereof. In some embodiments of all aspects disclosed herein, the nucleic acid sequence encoding the I-1 polypeptide is a codon optimized nucleic acid sequence selected from any of: SEQ ID NO: 385-412 or a nucleic acid sequence at least 80%, or at least 85%, or at least 90% or at least 95% or at least 98% sequence identity to SEQ ID NO: 385-412.

[0079] In some embodiments of all aspects disclosed herein, the rAAV vector can comprise at least one ITR located 5′ of the nucleic acid sequence encoding a Phosphatase inhibitor (I-1) polypeptide operably linked to the cardiac-specific promoter or muscle-specific promoter. In some embodiments of all aspects disclosed herein, the rAAV vector can comprise at least two ITRs flanking the nucleic acid sequence encoding a Phosphatase inhibitor (I-1) polypeptide operably linked to the cardiac-specific promoter or muscle-specific promoter. Any ITR sequence known to a person of ordinary skill in the art can be used, and includes, but is not limited to an ITR sequences selected from any one or more of: SEQ ID NO: 70-78, or a nucleic acid sequence having at least 85%, or at least 90% or at least 95% or at least 98% sequence identity to SEQ ID NOS: 70-78.

[0080] In some embodiments of all aspects of the compositions and methods as disclosed herein, the AAV vector comprises a reverse poly A sequence or double stranded RNA termination element, wherein the reverse polyA sequence or double stranded termination element are located 3′ of the nucleic acid sequence encoding a Phosphatase inhibitor (I-1) polypeptide. In some embodiments, the reverse poly A sequence, or double stranded RNA termination element is located between 3′ of the nucleic acid sequence encoding a Phosphatase inhibitor (I-1) polypeptide and 5′ of the right ITR. In some embodiments of all aspects of the compositions and methods as disclosed herein, the AAV vector further comprising a polyA sequence selected from any of SV40 polyA (SEQ ID NO: 334), HGH poly A (SEQ ID NO: 66), SEQ ID NO: 284-287, SEQ ID NO 331-335, or a nucleic acid sequence at least 85%, or at least 90% or at least 95% or at least 98% sequence identity to SEQ ID NOS: 334, 66, 284-287 or 331-335, wherein the polyA sequence is located 3′ of the nucleic acid sequence encoding a Phosphatase inhibitor (I-1) polypeptide.

[0081] In some embodiments of all aspects of the compositions and methods as disclosed herein, the AAV vector can further comprise a nucleic acid sequence encoding at least one immune modulator and/or a vasodilator, as disclosed herein. In some embodiments of all aspects of the compositions and methods as disclosed herein, the rAAV vector can be present in a composition or solution, where the solution further comprises an immune modulator. In some embodiments of all aspects of the compositions and methods as disclosed herein, the rAAV vector can be present in a composition or solution, where the solution further comprises a vasodilator.

[0082] Another aspect of the technology described herein relates to a pharmaceutical composition comprising: (i)adeno-associated virus (AAV) vector comprising a nucleic acid sequence encoding a Phosphatase inhibitor (I-1) polypeptide operably linked to any one of: (a) a cardiac-specific promoter selected from Table 2A or a variant thereof, (b) a muscle-specific promoter active in cardiac and skeletal muscle, or (c) any promoter when a cardiac tissue specific enhancer is present, or a variant thereof; and a pharmaceutically acceptable carrier. In some embodiments of all aspects of the compositions and methods as disclosed herein, the muscle-specific promoter active in cardiac and skeletal muscle is selected from Table 5A or Table 13A or a variant thereof, e.g., a variant comprising a nucleic acid sequence having at least at least 85%, or at least 90% or at least 95% or at least 98% sequence identity to a promoter listed in Table 5A or Table 13A.

[0083] In some embodiments of all aspects of the compositions and methods as disclosed herein, the AAV is selected from the group consisting of adeno-associated virus-1 (AAV1), AAV2, AAV3, AAV4, AAV5, AAV6, AAV7, AAV8, AAV9 and AAV2i8. In some embodiments of all aspects of the compositions and methods as disclosed herein, the AAV comprises a capsid that detargets the liver, as disclosed herein. In some embodiments of all aspects of the compositions and methods as disclosed herein, the AAV is AAV2i8. In some embodiments, the pharmaceutical composition comprises a AAV which comprises a nucleic acid selected from the group consisting of SEQ ID NO: 413-440, or a nucleic acid sequence at least 80%, or at least 85%, or at least 90% or at least 95% or at least 98% sequence identity sequence to a sequence selected from SEQ ID NO: 413-440, wherein the nucleic acids set forth in SEQ ID NO: 413-440 comprise a CMV promoter of SEQ ID NO: 330, wherein the CMV promoter of SEQ ID NO: 330 is replaced by any of: (a) a cardiac-specific promoter selected from Table 2A or a variant thereof (e.g., a variant comprising a nucleic acid sequence having at least at least 85%, or at least 90% or at least 95% or at least 98% sequence identity to a promoter listed in Table 2A), (b) a muscle-specific promoter active in cardiac and skeletal muscle, or (c) any promoter when a cardiac tissue specific enhancer is present, or a variant thereof, where the muscle-specific promoter active in cardiac and skeletal muscle is selected from Table 5A or Table 13A or a variant thereof, e.g., a variant comprising a nucleic acid sequence having at least at least 85%, or at least 90% or at least 95% or at least 98% sequence identity to a promoter listed in Table 5A or Table 13A.

[0084] In some embodiments, the pharmaceutical composition comprises a vasodilator. In some embodiments, the pharmaceutical composition comprises an immune modulator.

[0085] In some embodiments of all aspects disclosed herein, the pharmaceutical composition comprises AAV vector comprises a nucleic acid sequence encoding a I-1 polypeptide is selected from: (a) a nucleic acid sequence encoding a polypeptide comprising amino acids 1-65 of SEQ ID NO: 1, wherein threonine (T) at position 35 of SEQ ID NO: 1 is replaced with an amino acid that is not T, (b) a nucleic acid sequence encoding a polypeptide comprising amino acids 1-65 of SEQ ID NO: 1, wherein threonine (T) at position 35 of SEQ ID NO: 1 is replaced with an acid amino acid selected from any of: aspartic acid (D), glutamic acid (E), asparagine (N), glutamine (Q), (c) a nucleic acid sequence encoding a polypeptide comprising amino acids 1-65 of SEQ ID NO: 1, wherein threonine (T) at position 35 of SEQ ID NO: 1 is replaced with aspartic acid (D), or a conservative amino acid of aspartic acid.

[0086] In some embodiments of all aspects disclosed herein, the pharmaceutical composition comprises a rAAV which encodes a I-1c polypeptide selected from: amino acids 1-54 of SEQ ID NO: 1, amino acids 1-61 of SEQ ID NO: 1, amino acids 1-65 of SEQ ID NO: 1, amino acids 1-66 of SEQ ID NO: 1, amino acids 1-67 of SEQ ID NO: amino acids 1 or 1-77 of SEQ ID NO: 2, or a functional variant thereof, wherein the threonine at position 35 of SEQ ID NO: 1 is replaced with an aspartate acid (T35D), or a conservative amino acid of aspartate.

[0087] In some embodiments of all aspects disclosed herein, the pharmaceutical composition comprises a nucleic acid sequence encoding the I-1 polypeptide which is a codon optimized nucleic acid sequence, for example, where the codon optimized nucleic acid sequence has reduced CpG content or reduced CpG islands as compared to the wild-type reference sequence of a SEQ ID NO: 1, or a fragment thereof. In some embodiments of all aspects disclosed herein, the nucleic acid sequence encoding the I-1 polypeptide is a codon optimized nucleic acid sequence selected from any of: SEQ ID NO: 385-412 or a nucleic acid sequence at least 80%, or at least 85%, or at least 90% or at least 95% or at least 98% sequence identity to SEQ ID NO: 385-412.

[0088] Another aspect of the technology described herein relates to the use of an AAV vector as disclosed herein, for the manufacturer of a pharmaceutical composition for the treatment of a subject having cardiomyopathy. In some embodiments of all aspects of the compositions and methods as disclosed herein, the subject with cardiomyopathy to be treated has non-ischemic heart failure and/or non-ischemic cardiomyopathy. In some embodiments of all aspects of the compositions and methods as disclosed herein, the subject with cardiomyopathy has a congenital cardiomyopathy or a genetic disorder with a cardiac manifestation, for example, a genetic disorder with a cardiac manifestation as disclosed herein, which includes, but is not limited to a disease or disorder selected from the group consisting of: Arrhythmogenic right ventricular cardiomyopathy, Atrial myxoma, familial, Atrial septal defect ostium primum, Atrial septal defect sinus venosus, Barth syndrome, muscular dystrophy, Buerger disease, Cardioencephalomyopathy, Chromosome 1p36 deletion syndrome, Congenital generalized lipodystrophy type 4, Congenital heart block, Dilated cardiomyopathy, Duchenne muscular dystrophy (DMD), Fabry disease, Familial atrial fibrillation, Familial dilated cardiomyopathy, Familial hypertrophic cardiomyopathy, Familial progressive cardiac conduction defect, Familial thoracic aortic aneurysm and aortic dissection, Fibromuscular dysplasia, Friedreich ataxia, Gaucher disease, Glycogen storage disease (types 2, 3 or 4), His bundle tachycardia, Hurler syndrome, Hypoplastic left heart syndrome, Infantile histiocytoid cardiomyopathy, Intracranial arteriovenous malformation, Isobutyryl-CoA dehydrogenase deficiency, Kallikrein hypertension, Kawasaki disease, Kearns-Sayre syndrome, Left ventricular noncompaction, Limb-girdle muscular dystrophy (types 1B, 2E, 2F, 2M, 2C, 2D), Limited systemic sclerosis, Long QT syndrome 1, Lymphedema and cerebral arteriovenous anomaly, Lymphocytic vasculitis, Microcephaly-cardiomyopathy; Mitochondrial encephalomyopathy lactic acidosis and stroke-like episodes, Mitochondrial trifunctional protein deficiency, Myotonic dystrophy type 1, Neonatal stroke, Noonan syndromes 1 -, 2-, 3-, 4-, 5- and 6, Peripartum cardiomyopathy, Peters plus syndrome, PGM1-CDG, PHACE syndrome, Phospholamban Arg 14 Deletion, Postural orthostatic tachycardia syndrome, Primary carnitine deficiency, Progressive familial heart block (types 1A, 1B and 2), Pseudohypoaldosteronism type 2, Pulmonary arterial hypertension, Pulmonary atresia with intact ventricular septum, Pulmonary atresia with ventricular septal defect, Pulmonary valve stenosis, Pulmonary vein stenosis, Pulmonic stenosis, Renoprival hypertension, Retinal arterial macroaneurysm with supravalvular pulmonic stenosis, Right ventricle hypoplasia, Sarcoidosis, Sengers syndrome, Situs inversus, Sudden Arrhythmia Death Syndrome, Supravalvular aortic stenosis, Swyer syndrome, TANGO2-Related Metabolic Encephalopathy and Arrhythmias, TARP syndrome, Tetralogy of Fallot, Timothy syndrome, Tricuspid atresia, Vici syndrome, VLCAD deficiency and Williams syndrome.

[0089] In some embodiments of all aspects of the compositions and methods as disclosed herein, the rAAV as disclosed herein can be used to treat a subject with cardiomyopathy who has an ischemic cardiomyopathy. In some embodiments of all aspects of the compositions and methods as disclosed herein, the rAAV as disclosed herein can be used to treat a subject with cardiomyopathy who has heart failure, for example, where the subject with heart failure has a classification of heart failure based upon a classification system used by the American Heart Association (AHA), the American College of Cardiology (ACC) or the New York Heart Association (NYHA), or an equivalent classification thereof. In some embodiments of all aspects of the compositions and methods as disclosed herein, the rAAV as disclosed herein can be used to treat a subject with heart failure, e.g., where the subject with heart failure has a classification of a class III or above class III in the New York Heart Association (NYHA) classification system.

[0090] Another aspect of the technology described herein relates to the use of AAV vector as disclosed herein, for the manufacturer of a pharmaceutical composition for the treatment of a subject having a condition or disease associated with heart failure. In some embodiments, the subject has a classification of congestive heart failure (CHF) or heart failure (HF), for example, but not limited to a classification is based upon a classification system used by the American Heart Association (AHA), the American College of Cardiology (ACC) or the New York Heart Association (NYHA), or an equivalent classification system as disclosed herein. In some embodiments, the subject has non-ischemic heart failure or non-ischemic cardiomyopathy. In some embodiments, the subject has ischemic heart failure or ischemic cardiomyopathy. In some embodiments of all aspects of the compositions and methods as disclosed herein, the subject being treated according to the methods and compositions as disclosed herein has a reduced ejection fraction (rEF or HFrEF).

[0091] Another aspect of the technology described herein relates to a cell comprising a AAV vector as disclosed herein. In some embodiments, the cell is a cardiac cell or a muscle cell, and in some embodiments, the cell is in cell culture (i.e., in vitro), and in some embodiments, the cell is present in a subject (e.g., in vivo).

[0092] Another aspect of the technology described herein relates to the use of a AAV vector as disclosed herein, or a pharmaceutical formulation as disclosed herein, or a cell as disclosed herein, for use in the treatment of a subject having cardiomyopathy.

[0093] In some embodiments of all aspects of the compositions and methods as disclosed herein, the delivery of the rAAV vector disclosed herein (e.g., expressing an agent that modulates phosphatase activity, e.g., type 1 phosphatase activity) is cells which are non-mitotic, (e.g., cardiomyocytes). Accordingly, transgene expression can persist for the life of the cell, after at least 1 dose.

[0094] Another aspect of the technology described herein relates to the use of a AAV vector as disclosed herein, or a pharmaceutical formulation as disclosed herein, or a cell as disclosed herein, for use in the treatment of a patient having heart failure. In some embodiments of all aspects of the compositions and methods as disclosed herein, the AAV vector for use according to the methods disclosed herein is administered to a subject who has a classification of congestive heart failure (CHF), e.g., where the classification is based upon a classification system used by the American Heart Association (AHA), the American College of Cardiology (ACC) or the New York Heart Association (NYHA), or an equivalent classification system thereof.

[0095] In some embodiments of all aspects of the compositions and methods as disclosed herein, the subject has non-ischemic heart failure or non-ischemic cardiomyopathy. In some embodiments of all aspects of the compositions and methods as disclosed herein, the subject has ischemic heart failure or ischemic cardiomyopathy. In some embodiments of all aspects of the compositions and methods as disclosed herein, the subject has reduced ejection fraction (rEF or HFrEF). In some embodiments of all aspects of the compositions and methods as disclosed herein, the subject with heart failure has a cardiovascular disease or heart disease is selected from any of: congestive heart failure (CHF), left ventricular remodeling, peripheral arterial occlusive disease (PAOD), dilated cardiomyopathy (DCM) including idiopathic dilated cardiomyopathy (IDCM), coronary artery disease, ischemia, arrhythmia, myocardial infarction (MI), abnormal heart contractility, acute (decompensated) heart failure (AHF), abnormal Ca2+ metabolism, myocardial ischemia, atherosclerosis, cardiomyopathy, idiopathic cardiomyopathy, genetic disorder induced cardiomyopathy, cardiac arrhythmias, muscular dystrophy, muscle mass abnormality, muscle degeneration, infective myocarditis, drug- or toxin-induced muscle abnormalities, hypersensitivity myocarditis, an autoimmune endocarditis and congenital heart disease and pulmonary heart hypertension. In some embodiments of all aspects of the compositions and methods as disclosed herein, the subject with heart failure has any one of: ischemia, arrhythmia, myocardial infarction, abnormal heart contractibility, or abnormal Ca2+ metabolism.

[0096] In some embodiments of all aspects of the compositions and methods as disclosed herein, the subject has one or more of: (a) non-ischemic heart failure; (b) non-ischemic cardiomyopathy, (c) a classification of congestive heart failure (CHF) is based upon a classification system used by the American Heart Association (AH), the American College of Cardiology (ACC) or the New York Heart Association (NYHA) or an classification using an equivalent classification system; or (d) a reduced ejection fraction (rEF or HFrEF).

[0097] Another aspects of the technology disclosed herein relates to a method of expressing a phosphatase inhibitor (I-1) polypeptide in a subject with cardiomyopathy, the method comprising introducing into the subject with cardiomyopathy, at least one dose of the AAV vector according to the methods as disclosed herein, where the subject with cardiomyopathy has a classification of heart failure, and where the at least one dose of the rAAV is selected from a total dose-range of about 10¹³vg to about 10¹⁵vg, and where at least twelve months post-administration there is an improvement in the classification of heart failure. In some embodiments, the classification of heart failure is based upon a classification system used by the American Heart Association (AH), the American College of Cardiology (ACC) or the New York Heart Association (NYHA), or an equivalent classification system. In some embodiments of all aspects of the methods as disclosed herein, there is an improvement of classification of at least one level, or at least two levels, at least 12 months after administration of the rAAV, or in some embodiments, an improvement of classification of at least one level, or at least two levels, at least 6 months after administration of the rAAV. In some embodiments, at least twelve months post-administration there is an improvement of at least 1, or 2 levels in the classifications in any one or more of: the American Heart Association (AH), the American College of Cardiology (ACC), or the New York Heart Association (NYHA) classification systems, or equivalent HF classification systems.

[0098] In some embodiments of all aspects of the methods as disclosed herein, the rAVV is administered with an immune modulator concurrent with, or before, or after the administration of the at least one dose of a rAAV vector. In some embodiments of all aspects of the methods as disclosed herein, the rAVV is administered with a vasodilator concurrent with, and/or before, and/or after the administration of the at least one dose of a rAAV vector.

[0099] In some embodiments of all aspects of the methods as disclosed herein, administration of the rAAV is into the lumen of the coronary artery of the heart of the patient. In some embodiments where administration of the rAAV is for treatment of a subject with ischemic cardiomyopathy, administration is directly into the muscle of the heart, e.g., into the ischemic cardiac muscle or MI.

[0100] In some embodiments of all aspects of the methods as disclosed herein, administration of at least one dose of the rAAV is a total dose-range of about 10¹³vg to about 10¹⁵vg., and can be administered in one dose or 2 to 5 sub-doses. In some embodiments of all aspects of the methods as disclosed herein, the total dose is administered as any of the following administration methods: (a) over a period of time of about 20 minutes to about 30 minutes, (b) administered in a series of sub-doses, wherein each sub-dose is administered over a period of time of about 1 minute to about5 minutes, and (c) administered in a series of five sub-doses, each sub-dose is administered over a period of time of about 1 minute to about 5 minutes, and wherein the five sub-doses are administered over a period of about 20 minutes to about 30 minutes.

[0101] Another aspect of the technology described herein relates to a method of treating a patient having a heart failure, comprising: administering into heart cells of the patient, at least one total dose of a rAAV vector comprising a nucleic acid sequence encoding a phosphatase inhibitor protein that inhibits phosphatase activity, wherein, at least one total dose of the rAAV is selected from a dose-range of about 10¹³vg to about 10¹⁵vg, wherein, the total dose is administered over a period of time of about 20 minutes to about 30 minutes, wherein, the administration of the total dose is performed in sub-doses, wherein each sub-dose is administered over a period of time of 1-5 minutes. In some embodiments, the heart failure is selected from any one or more of: ischemia, arrhythmia, myocardial infarction, abnormal heart contractibility, or abnormal Ca2+ metabolism.

[0102] In some embodiments, the rAAV vector further comprises CMV promoter or a synthetic promoter, operatively linked to the phosphatase inhibitor protein. In some embodiments, the synthetic promoter is a cardiac-specific promoter selected from Table 2A or a variant thereof, or a muscle-specific promoter active in cardiac and skeletal muscle selected from Table 5A or a variant thereof. In some embodiments, the synthetic promoter causes expression of the therapeutic nucleic acid or phosphatase inhibitor protein preferentially in smooth muscle cells. In some embodiments, the synthetic promoter causes expression of the therapeutic nucleic acid or phosphatase inhibitor protein preferentially in cardiac cells. In some embodiments, the expression of the therapeutic nucleic acid or phosphatase inhibitor protein by the cardiac- or muscle-specific promoter is equivalent to, or greater than, the expression caused by CMV promoter.

[0103] In some embodiments, in the method for a method of treating a patient having a heart failure, the rAAV is selected from the group consisting of AAV2, AAV6, AAV8, AAV9, AAV2i8, rh10, AAV2.5 and AAV2G9. In some embodiments, the rAAV is AAV2i8 or AAV9. In some embodiments, the rAAV is selected from any AAV serotypes disclosed in Table 11.

[0104] In some embodiments, in the method for a method of treating a patient having a heart failure, the administration of the total dose is performed in five sub-doses, each sub-dose is administered over a period of time of 1-5 minutes. In some embodiments, the five sub-doses are administered over a period of about 20 minutes to about 30 minutes.

[0105] In some embodiments, in the method for a method of treating a patient having a heart failure, the at least one total dose of the rAAV is 10¹³ vg, 3×10¹³ vg, 10¹⁴ vg, 3×10¹⁴ vg, or, 10¹⁵ vg. In some embodiments, at least one sub-dose of the rAAV is 10¹³ vg, 3×10¹³ vg, 10¹⁴ vg, 3×10¹⁴vg, or, 10¹⁵ vg. In some embodiments, at least one dose is a total dose-range of about 10¹³vg to about 10¹⁵vg., administered in 2 to 5 sub-doses. In some embodiments, in the method for a method of treating a patient having a heart failure, the administration is into the lumen of the coronary artery of the heart of the patient.

[0106] In all aspect of the methods and compositions as disclosed herein, in some embodiments, the phosphatase inhibitor I-1 comprises amino acids 1-65 of SEQ ID NO: 1 or a functional fragment thereof, wherein the threonine at position 35 of SEQ ID NO: 1 is replaced with an aspartate acid (T35D). In all aspect of the methods and compositions as disclosed herein, in some embodiments, the nucleic acid encoding phosphatase inhibitor encodes a constitutively active fragment of I-1 (I-1c) comprising a fragment of SEQ ID NO: 1, wherein the fragment is selected from: amino acids 1-54 of SEQ ID NO: 1, 1-61 of SEQ ID NO: 1, 1-65 of SEQ ID NO: 1, 1-66 of SEQ ID NO: 1, 1-67 of SEQ ID NO: 1 or 1-77 of SEQ ID NO: 1, or a functional variant thereof, wherein the threonine at position 35 of SEQ ID NO: 1 is replaced with an aspartate acid (T35D).

[0107] Another aspect of the technology described herein relates to an adeno-associated virus (AAV) vector comprising a nucleic acid sequence encoding a polypeptide comprising at least amino acids 1-54 of SEQ ID NO: 1, wherein threonine at amino acid 35 of SEQ ID NO: 1 is replaced with an aspartic acid, and wherein said nucleic acid sequence is operably linked to a promoter selected from any of: a CMV promoter, a cardiac-specific promoter selected from Table 2A or a variant thereof, or a muscle-specific promoter active in cardiac and skeletal muscle selected from Table 5A or a variant thereof. In some embodiments, the polypeptide is selected from: amino acids 1-54 of SEQ ID NO: 1, amino acids 1-61 of SEQ ID NO: 1, amino acids 1-65 of SEQ ID NO: 1, amino acids 1-66 of SEQ ID NO: 1, amino acids 1-67 of SEQ ID NO: amino acids 1 or 1-77 of SEQ ID NO: 2, or a functional variant thereof, wherein the threonine at position 35 of SEQ ID NO: 1 is replaced with an aspartate acid (T35D). In some embodiments, the rAAV is selected from the group consisting of AAV2, AAV6, AAV8, AAV9, AAV2i8, rh10, AAV2.5 and AAV2G9. In some embodiments, the rAAV is AAV2i8 or AAV9. In some embodiments, the rAAV is selected from any AAV serotypes disclosed in Table 11.

[0108] Another aspect of the technology described herein relates to a pharmaceutical composition comprising (i) adeno-associated virus (AAV) vector comprising a nucleic acid sequence encoding a polypeptide comprising at least amino acids 1-54 of SEQ ID NO: 1, wherein threonine at amino acid 35 of SEQ ID NO: 1 is replaced with an aspartic acid (T35D), and wherein said nucleic acid sequence is operably linked to a cardiac-specific promoter selected from Table 2A or a variant thereof, or a muscle-specific promoter active in cardiac and skeletal muscle selected from Table 5A or a variant thereof, and (ii) a pharmaceutically acceptable carrier.

[0109] In some embodiments, the rAAV vector of the pharmaceutical composition comprises a nucleic acid sequence encoding a polypeptide selected from: amino acids 1-54 of SEQ ID NO: 1, amino acids 1-61 of SEQ ID NO: 1, amino acids 1-65 of SEQ ID NO: 1, amino acids 1-66 of SEQ ID NO: 1, amino acids 1-67 of SEQ ID NO: amino acids 1 or 1-77 of SEQ ID NO: 2, or a functional variant thereof, wherein the threonine at position 35 of SEQ ID NO: 1 is replaced with an aspartate acid (T35D). In some embodiments, the rAAV in the pharmaceutical composition is selected from the group consisting of AAV2, AAV6, AAV8, AAV9, AAV2i8, rh10, AAV2.5 and AAV2G9. In some embodiments, the rAAV is AAV2i8 or AAV9. In some embodiments, the rAAV is selected from any AAV serotypes disclosed in Table 11.

[0110] In all aspect of the methods and compositions as disclosed herein, the method can be performed more than once. For example, the patient can be administered the rAAV vector at a first time point, and for example, after about 3 months, or after about 6 months, or after about 12-months, or after about 2 years, or after about 3 years, the patient can be administered the rAAV vector according to the methods disclosed herein a second time. In some embodiments, the subject or patient can be administered the rAAV vector according to the methods as disclosed herein multiple times, e.g., at least 2, or at least 3, or at least 4, or at least 5 or at least 6 or more than 6 times according to the methods disclosed herein.

[0111] All other aspects of the technology are described below.

### BRIEF DESCRIPTION OF THE DRAWINGS

[0112] The following Detailed Description, given by way of example, but not intended to limit the invention to specific embodiments described, may be understood in conjunction with the accompanying drawings, incorporated herein by reference. Various preferred features and embodiments of the present invention will now be described by way of non-limiting example and with reference to the accompanying drawings, in which:

[0113] FIG. 1 shows in vivo expression of the luciferase gene in heart tissue (cardiac muscle) from the muscle specific promoter SP0067, as compared to other control promoters (CBA and CK8b intron), or a saline control.

[0114] FIG. 2 shows in vivo expression of luciferase gene in Tibialis Anterion (TA) muscle from the muscle specific promoter SP0067, as compared to other control promoters (CBA and CK8b intron), or a saline control.

[0115] FIG. 3 shows the in vivo expression of luciferase gene from synthetic cardiac-specific promoter SP0067 in diaphragm (diaph), quadriceps (Quad), tibialis anterior (TA), heart, intestine and liver. SP0067 is active in vivo in heart muscle but not active in skeletal muscles (diaphragm (diaph), quadriceps (Quad), tibialis anterior (TA)). SP0067 also has some in vivo activity in liver.

[0116] FIGS. 4A-4B shows the average in vitro expression of synthetic cardiac-specific promoters in human cardiac and skeletal muscle cells (H9C2 or H2K cells). FIG. 4A shows expression of a marker gene in a pAAV-SYNP vector operatively linked to SP0067, SP0424 or SP0425 synthetic promoters in H2K mouse skeletal muscle cells, where H2K cells have been differentiated into skeletal muscle myotubes, where the data is normalised to the activity of the known promoter CBA. A relative activity of 1 is equal to the activity of CBA. The error bar is standard deviation. FIG. 4B shows the average expression of a marker gene in a pAAV-SYNP vector operatively linked to SP0067, SP0424, SP0425, SP0429, SP0430, SP0344, SP0433, SP0435, SP0436 synthetic promoters in H9C2 rat cardiomyocyte cells, where H9C2 cells have been differentiated into cardiac muscle (heart) myotubes, and normalised to the activity of the known promoter CBA. A relative activity of 1 is equal to the activity of CBA. The error bar is standard deviation. The error is standard deviation of at least three replicate experiments.

[0117] FIGS. 5A-5F shows in vivo activity of synthetic muscle specific promoters that are active in skeletal and cardiac muscle. FIG. 5A shows the in vivo activity of synthetic muscle specific promoters, the control promoters CBA and CK8 as well as saline negative control in the heart. FIG. 5B shows the in vivo activity of synthetic muscle specific promoters, the control promoters CBA CK8 as well as saline negative control in the diaphragm. FIG. 5C shows the in vivo activity of synthetic muscle specific promoters, the control promoters CBA and CK8 as well as saline negative control in the quadriceps. FIG. 5D shows the in vivo activity of synthetic muscle specific promoters, the control promoters CBA and CK8 as well as saline negative control in the intestine. FIG. 5E shows the in vivo activity of synthetic muscle specific promoters, the control promoters CBA and CK8 as well as saline negative control in the tibialis anterior. FIG. 5F shows the in vivo activity of synthetic muscle specific promoters, the control promoters CBA and CK8 as well as saline negative control in the liver.

[0118] FIGS. 6A-6K shows in vivo activity of exemplary synthetic muscle specific promoters SP0173, SP0270, SP0268, SP0320, SP0279, SP0134, SP0057, SP0229, SP0067, SP0310 and SP0267 that are active in cardiac and skeletal muscle. FIG. 6A shows the in vivo activity of synthetic muscle specific promoter SP0173 in the diaphragm, heart, intestine, liver, quadriceps (quad) and tibialis anterior (TA). FIG. 6B shows the in vivo activity of synthetic muscle specific promoter SP0270 in the diaphragm, heart, intestine, liver, quadriceps (quad) and tibialis anterior (TA). FIG. 6C shows the in vivo activity of synthetic muscle specific promoter SP0268 in the diaphragm, heart, intestine, liver, quadriceps (quad) and tibialis anterior (TA). FIG. 6D shows the in vivo activity of synthetic muscle specific promoter SP0320 in the diaphragm, heart, intestine, liver, quadriceps (quad) and tibialis anterior (TA). FIG. 6E shows the in vivo activity of synthetic muscle specific promoter SP0279 in the diaphragm, heart, intestine, liver, quadriceps (quad) and tibialis anterior (TA). FIG. 6F shows the in vivo activity of synthetic muscle specific promoter SP0134 in the diaphragm, heart, intestine, liver, quadriceps (quad) and tibialis anterior (TA). FIG. 6G shows the in vivo activity of synthetic muscle specific promoter SP0057 in the diaphragm, heart, intestine, liver, quadriceps (quad) and tibialis anterior (TA). FIG. 6H shows the in vivo activity of synthetic muscle specific promoter SP0229 in the diaphragm, heart, intestine, liver, quadriceps (quad) and tibialis anterior (TA). FIG. 6I shows the in vivo activity of synthetic muscle specific promoter SP0067 in the diaphragm, heart, intestine, liver, quadriceps (quad) and tibialis anterior (TA). FIG. 6J shows the in vivo activity of synthetic muscle specific promoter SP0310 in the diaphragm, heart, intestine, liver, quadriceps (quad) and tibialis anterior (TA). FIG. 6K shows the in vivo activity of synthetic muscle specific promoter SP0267 in the diaphragm, heart, intestine, liver, quadriceps (quad) and tibialis anterior (TA).

[0119] FIGS. 7A-7P shows in vivo activity of exemplary synthetic cardiac muscle specific promoters SP0067, SP0451, SP0452, SP0430, SP0450, SP0429, SP0424, SP0435, SP0436, SP0433, SP0449, SP0344, SP0475 that are active in cardiac muscle, in selected tissues (liver, heart, tibialis anterior (TA), quadriceps (Quad), soleus, and diaphragm (Diaph), as compared to the muscle specific promoters CK8, or cardiac specific promoters control 1 or control 2. FIG. 7A shows the in vivo activity of the exemplary comparison liver promoter CK8 in the liver, heart, tibialis anterior (TA), quadriceps (Quad), soleus, and diaphragm (Diaph), showing liver expression at 1×10⁵ RLU/mg and heart expression at 1×10⁶⁻⁷ RLU/mg. FIG. 7B shows the in vivo activity of the cardiac muscle promoter SP0067 in the liver, heart, tibialis anterior (TA), quadriceps (Quad), soleus, and diaphragm (Diaph), showing specific expression in the heart at 1×10⁵ RLU/mg and lower expression in skeletal or smooth muscle tissues, and also lower expression in liver at 1×10⁴ RLU/mg. FIG. 7C shows the in vivo activity of the cardiac muscle promoter SP0344 in the liver, heart, tibialis anterior (TA), quadriceps (Quad), soleus, and diaphragm (Diaph), showing specific expression in the heart at about 1×10⁷ RLU/mg and lower expression in skeletal or smooth muscle tissues. FIG. 7D shows the in vivo activity of the cardiac muscle promoter SP0424 in the liver, heart, tibialis anterior (TA), quadriceps (Quad), soleus, and diaphragm (Diaph), showing very specific expression in the heart at 1×10⁷ to 1×10⁸ RLU/mg and lower expression at about 1×10⁴ RLU/mg in the liver and skeletal or smooth muscle tissues. FIG. 7E shows the in vivo activity of the cardiac muscle promoter SP0429 in the liver, heart, tibialis anterior (TA), quadriceps (Quad), soleus, and diaphragm (Diaph), showing very specific expression in the heart at 1×10⁸ RLU/mg and lower expression at about 1×10⁴ to about 1×10⁵ RLU/mg in the liver and skeletal or smooth muscle tissues. FIG. 7F shows the in vivo activity of the cardiac muscle promoter SP0430 in the liver, heart, tibialis anterior (TA), quadriceps (Quad), soleus, and diaphragm (Diaph), showing very specific expression in the heart at 1×10⁸ RLU/mg and lower expression at about 1×10⁴ to about 1×10⁵ RLU/mg in the liver and skeletal or smooth muscle tissues. FIG. 7G shows the in vivo activity of the cardiac muscle promoter SP0433 in the liver, heart, tibialis anterior (TA), quadriceps (Quad), soleus, and diaphragm (Diaph), showing specific expression in the heart at 1×10⁷ RLU/mg and lower expression in skeletal or smooth muscle tissues and in the liver. FIG. 7H shows the in vivo activity of the positive control cardiac muscle promoter control 1 in the liver, heart, tibialis anterior (TA), quadriceps (Quad), soleus, and diaphragm (Diaph), showing expression in the heart at 1×10⁷ RLU/mg and lower expression in skeletal or smooth muscle tissues, and in the liver tissue. FIG. 7I shows the in vivo activity of the cardiac muscle promoter SP0435 in the liver, heart, tibialis anterior (TA), quadriceps (Quad), soleus, and diaphragm (Diaph), showing very specific expression in the heart at between 1×10⁷ and 1×10⁸ RLU/mg and lower expression at about 1×10⁴ RLU/mg in the liver and skeletal or smooth muscle tissues. FIG. 7J shows the in vivo activity of the cardiac muscle promoter SP0436 in the liver, heart, tibialis anterior (TA), quadriceps (Quad), soleus, and diaphragm (Diaph), showing expression in the heart at 1×10⁷ RLU/mg and expression levels below about 1×10⁴ and 1×10⁶ RLU/mg in the liver and skeletal or smooth muscle tissues. FIG. 7K shows the in vivo activity of the positive control cardiac muscle promoter control 2 in the liver, heart, tibialis anterior (TA), quadriceps (Quad), soleus, and diaphragm (Diaph), showing very specific expression in the heart at 1.5×10⁶ RLU/mg and expression levels below about 1×x10⁴ in skeletal or smooth muscle tissues. FIG. 7L shows the in vivo activity of the cardiac muscle promoter SP0449 in the liver, heart, tibialis anterior (TA), quadriceps (Quad), soleus, and diaphragm (Diaph), showing expression in the heart at 1×10⁷ RLU/mg and expression levels below about 1.5×10⁵ RLU/mg in the liver and skeletal or smooth muscle tissues. FIG. 7M shows the in vivo activity of the cardiac muscle promoter SP0450 in the liver, heart, tibialis anterior (TA), quadriceps (Quad), soleus, and diaphragm (Diaph), showing very specific expression in the heart at 1.0×10⁸ RLU/mg and expression levels below about 1×10⁵ in the liver and skeletal or smooth muscle tissues. FIG. 7N shows the in vivo activity of the cardiac muscle promoter SP0451 in the liver, heart, tibialis anterior (TA), quadriceps (Quad), soleus, and diaphragm (Diaph), showing specific expression in the heart at above 1.0×10⁸ RLU/mg and expression levels below about 1.5×10⁵ in skeletal or smooth muscle tissues, and expression in liver is even below at about 1×10⁴ RLU/mg. FIG. 7O shows the in vivo activity of the cardiac muscle promoter SP0452 in the liver, heart, tibialis anterior (TA), quadriceps (Quad), soleus, and diaphragm (Diaph), showing specific expression in the heart at above 1.0×10⁸ RLU/mg and expression levels below about 1.5×10⁵ in skeletal or smooth muscle tissues, and expression in liver at about 1.5×10⁴ RLU/mg. FIG. 7P shows the in vivo activity of the cardiac muscle promoter SP0475 in the liver, heart, tibialis anterior (TA), quadriceps (Quad), soleus, and diaphragm (Diaph), showing expression in the heart at above 1×10⁵ RLU/mg and expression levels below about 1.5×10⁴ RLU/mg in the liver and skeletal or smooth muscle tissues.

[0120] FIG. 8 shows the in vitro activity of synthetic muscle specific promoter SP0521 and SP4169 in the muscle cell line H9C2 as compared to CBA and CK8 control promoters. This figure shows the average activity, normalized to the CBA promoter, of synthetic short muscle-specific promoters SP0521 and SP4769 in H9C2 cell line differentiated into heart myotubes. The error bar is standard deviation from triplicate experiments.

### DETAILED DESCRIPTION

[0121] Disclosed herein are methods for administration AAV vectors, as well as methods and compositions comprising AAV vectors for the improved treatment of cardiovascular diseases and disorders, heart disorders and diseases, including cardiomyopathy, heart failure and congestive heart failure (CHF). In some embodiments, the heart failure is non-ischemic heart failure or the subject has non-ischemic cardiomyopathy. In some embodiments, the heart failure is ischemic heart failure or the subject has ischemic cardiomyopathy. Non-ischemic heart failure includes genetic based and nutritionally caused failures.

[0122] In particular, aspects of the present invention are directed to novel methods of administration and novel rAAV compositions for the treatment of subjects with heart failure, including methods of administration comprising administering to a subject with a classification of heart failure a dose of a rAAV where upon at least 12-months after the administration the classification of the heart failure is improved by at least one, or at least two stages or classification levels. In some embodiments, the methods of administration disclosed herein can be used in combination with other agents, including but not limited to use of immunomodulators and/or vasodilators, as well as rAAV vectors comprising a codon optimized nucleic acid sequence to encode I-1c, and/or rAAV vectors comprising novel cardiac-specific muscle promoters. Moreover, the inventors have demonstrated different ways to treat subjects with heart failure, including subjects with non-ischemic cardiomyopathy and ischemic cardiomyopathy that have the ability to significantly improve the subjects’ categorization in a classification system used to assess heart failure. A range of classification systems to categorize the extent of a subjects’ of heart failure can be used and are well known in the art, and includes but are not limited to American Heart Association (AHA), the American College of Cardiology (ACC), Minnesota LIVING WITH HEART FAILURE® Questionnaire (MLHFQ or, MLWHF), Kansas City Cardiomyopathy questionnaire (KCCQ), or the 2016 European Society of Cardiology guidelines (ESCG), the Japanese heart failure Society (JHFS) guidelines, The Japanese Circulation Society (JCS) Guidelines, or, the New York Heart Association (NYHA), or equivalent or modified assessments or combinations or merged assessments thereof.

[0123] For exemplary purposes only and without wishing to be limited to theory, the methods of treating a subject with heart failure as disclosed herein, or administration methods as disclosed herein have been demonstrated to improve a subject’s classification of heart failure, within at 12-months post-administration of a rAAV disclosed herein, from, e.g., a category IV to a category III or less than category III, or for e.g., from a category III to a category II or less than category II, according to a heart failure classification system as disclosed herein. In some embodiments, the NYHA or the AHA or the ACC classifications are used, or any other comparative heart failure classification system known to a person of ordinary skill in the art.

[0124] In particular, the one aspect of the technology described herein generally relates to a method to administer a recombinant AAV (rAAV) vector, where the method is a single administration to the subject, where the single administration comprises at least 2, or 3, or 4, or 5 or more doses within the single administration. That is, stated differently, in some embodiments, the method comprises administering a rAAV vector to the subject in a single administration constituting multiple doses, e.g., using a bolus to administer a discrete amount over a specific time period in small sub-doses within that time period. The single administration can also comprise the administration of rAAV from least 2, or 3, or 4, or 5 or more vials or, syringes, in which the delivery of the rAAV from each vial or, each syringe between 1-5 minutes, or more than 5 minutes. Without limiting to any theory, an exemplary syringe can be a simple reciprocating pump consisting of a plunger (though in modem syringes, it is actually a piston) that fits tightly within a cylindrical tube called a barrel. The plunger is linearly pulled and pushed along the inside of the tube, allowing the syringe to take in and expel liquid or gas through a discharge orifice at the front (open) end of the tube. The open end of the syringe is fitted with a hypodermic needle, a nozzle or, tubing to direct the flow into and out of the barrel. In some embodiments, the methods relate to administration of a rAAV vector to the heart. In some embodiments, the rAAV vector comprises a cardiac-specific promoter, for example, an exemplary cardiac-specific promoter disclosed in Tables 1-3 herein. In some embodiments, the rAAV vector is administered according to the disclosed methods for the treatment of cardiovascular conditions, heart failure or a heart disease or disorder. In some embodiments, the rAAV vector administered according to the methods disclosed herein is a rAAV vector comprises a nucleic acid encoding a therapeutic agent for treatment of heart failure, where the nucleic acid is operatively linked to a cardiac-specific promoter as disclosed in Tables 1-3. In some embodiments, the promoter can be a regulatable promoter, e.g., an inducible promoter or a repressible promoter, or a promoter with zinc-fingers, TALONS, etc., as known in the art.

[0125] In some embodiments, the technology described herein relates to a method where administration of a single doses of a viral vector in sub-doses are intended as disclosed herein, and the viral vector is co-administered with an immune modulator, as disclosed herein.

[0126] Another aspect of the disclosure described herein relates to recombinant AAV (rAAV) vectors and constructs for rAAV genomes for gene therapy for delivering an inhibitor of protein phosphatase 1 (PP1) to a subject. In particular, the technology described herein relates in general to a rAAV vector, or a rAAV genome for producing an inhibitor of PP1, e.g., a I-1 polypeptide, or functional fragment or variant thereof, that is expressed in the heart, for example, human cardiac and skeletal muscle cells. For example, the technology relates to a rAAV vector for expressing a transgene in the heart, e.g., cardiac and smooth muscle cells.

[0127] In particular, in some embodiments, the inhibitor of PP1 is expressed under the control of cardiac-specific promoters (CSP) in a recombinant rAAV vector.

[0128] One aspect of the technology described herein relates to a rAAV vector that comprises a nucleotide sequence containing inverted terminal repeats (ITRs), a promoter, a heterologous gene, a polyA tail and potentially other regulator elements for use to treat a cardiovascular condition, heart disorder or heart disease, such as heart failure, and further, for the treatment of heart failure, wherein the heterologous gene is an inhibitor of PP1 and wherein the rAAV PP1 inhibitor can be administered to a patient in a therapeutically effective dose that is delivered to the appropriate tissue and/or organ for expression of the heterologous gene and treatment of the disease.

[0129] One aspect of the technology described herein relates to a rAAV vector that comprises in its genome the following in a 5′ to 3′ direction: 5′- and 3′-AAV inverted terminal repeats (ITR) sequences, and located between the 5′ and 3′ ITRs, a heterologous nucleic acid sequence encoding an inhibitor of protein phosphatase 1 (PP1), wherein the heterologous nucleic acid is operatively linked to a cardiac-specific promoter (CSP), for example, a cardiac specific promoter disclosed in Table 2A herein, or a functional variant thereof.

[0130] In some embodiments, the a rAAV vector described herein is from any serotype. In some embodiments, the rAAV vector is a AAV3b serotype, including, but not limited to, an AAV3b265D virion, an AAV3b265D549A virion, an AAV3b549A virion, an AAV3bQ263Y virion, or an AAV3bSASTG virion (i.e., a virion comprising a AAV3b capsid comprising Q263A/T265 mutations). In some embodiments, the virion can be rational haploid, or a chimeric or any mutant, such as capsids can be tailored for increased update at a desired location, e.g., the heart. Other capsids can include capsids from any of the known AAV serotypes, including AAV1, AAV2, AAV3, AAV4, AAV5, AAV6, AAV7, AAV8, AAV9, AAV10, etc. In some embodiments, the rAAV vector comprises a liver specific capsid, e.g., a liver specific capsid selected from XL32 and XL32.1, as disclosed in WO2019/241324, which is incorporated herein in its entirety by reference. In some embodiments, the rAAV vector is a AAVXL32 or AAVXL32.1 as disclosed in WO2019/241324, which is incorporated herein in its entirety by reference.

### I. Methods of Treatment of Subjects With a Cardiovascular Condition, Heart Disease and Heart Failure, and CHF

### A. Method of Treatment of Heart Disorders and Heart Disease

### Subjects Amenable

[0131] Heart failure (HF) is a complex syndrome caused by the heart not functioning properly. Different types of heart failure are classified by specific characteristics, including symptoms and limitations of function. Heart failure can have identifiable or unknown causes. The diagnosis of heart failure, according to established guidelines, is based on criteria which include the presence of symptoms and signs, evidence of reduced cardiac function on diagnostic tests, and/or a favourable response to treatment.

[0132] There are multiple classifications of heart failure, but the two main ones are the New York Heart Association (NYHA) and the American College of Cardiology/American Heart Association (ACC/AHA) which have complementary classification systems. The severity of the heart failure is dependent on the subjects’ symptoms and level of heart function.

[0133] One aspect of the technology disclosed herein is a method of treating a subject with heart failure with a rAAV, or where upon after 12-months or earlier after administration there is an improvement in at least one level of the subject’s classification of heart failure. For exemplary purposes, a subject can be assessed by a physician as going from, e.g., a category IV to a category III or less than category III, or for e.g., from a category III to a category II or less than category II, in one or more heart failure classification system, as disclosed herein. In some embodiments, the NYHA or the AHA or the ACC classifications are used, or any other comparative heart failure classification system known to a person of ordinary skill in the art.

### B. Heart Failure Classification Systems

[0134] Heart failure classification systems are well known in the art, and includes but are not limited to American Heart Association (AHA), the American College of Cardiology (ACC), Minnesota LIVING WITH HEART FAILURE® Questionnaire (MLHFQ), Kansas City Cardiomyopathy questionnaire (KCCQ), or the 2016 European Society of Cardiology guidelines (ESCG), the Japanese heart failure Society (JHFS) guidelines, The Japanese Circulation Society (JCS) Guidelines, or, the New York Heart Association (NYHA), or modified assessments or combinations or merged assessments thereof.

### (I) New York Heart Association (NYHA):

[0135] One heart failure classification system useful in the methods disclosed herein is the NYHA classification system. The NYHA (New York Heart Association) classifies HF into classes I, II, III, and IV based on symptom severity. Yancy CW, et al., Circulation 2013;128:e240-e327; Adapted from Dolgin M, Association NYH, Fox AC, Gorlin R, Levin RI, New York Heart Association. Criteria Committee. Nomenclature and criteria for diagnosis of diseases of the heart and great vessels. 9th ed. Boston, MA: Lippincott Williams and Wilkins; Mar. 1, 1994; Original source: Criteria Committee, New York Heart Association, Inc. Diseases of the Heart and Blood Vessels. Nomenclature and Criteria for diagnosis, 6th edition Boston, Little, Brown and Co. 1964, p 114.

[0136] Physicians can classify a subject’s heart failure according to the severity of their self-reported symptoms. The classification system used most often is the New York Heart Association (NYHA) Functional Classification. Four levels of clinical classification are used to classify people according to symptoms and limitations experienced during physical activity. Symptom severity is compared to normal breathing, shortness of breath, and/or angina (chest pain or discomfort). Classification of heart failure based on function during physical activity, often called exertion, is often an important indicator of prognosis. There are 4 classes or stages in the NYHA which are as follows:

[0137] Class I (Mild): No limitation of physical activity. ordinary physical activity does not cause undue fatigue, palpitation, dyspnea (shortness of breath).

[0138] Class II (Mild): Slight limitation of physical activity. Comfortable at rest. Ordinary physical activity results in fatigue, palpitation, dyspnea.

[0139] Class III (Moderate): Marked limitation of physical activity. Comfortable at rest. Less than ordinary activity causes fatigue, palpitation, or dyspnea.

[0140] Class IV (Severe): Symptoms of heart failure occur even at rest. Unable to carry on any physical activity without discomfort. If any physical activity is undertaken, discomfort increases.

[0141] Class I and II are typically considered mild heart failure, while class III and IV are considered more severe or advanced heart failure. A person can move back and forth between these classes as they are based on symptoms. When a patient has a heart failure exacerbation, they will have more symptoms and likely be a higher class, but when their symptoms are better controlled, they will be a lower class.

[0142] Table 1A: New York Heart Association (NYHA) Classification classes/stages:

| | |
|---|---|
| NYHA Class | Symptoms |
| I | No limitation of physical activity. Ordinary physical activity does not cause undue fatigue, palpitation, dyspnea (shortness of breath). |
| II | Slight limitation of physical activity. Comfortable at rest. Ordinary physical activity results in fatigue, palpitation, dyspnea. |
| III | Marked limitation of physical activity. Comfortable at rest. Less than ordinary activity causes fatigue, palpitation, or dyspnea. |
| IV | Unable to carry on any physical activity without discomfort. Symptoms of heart failure at rest. If any physical activity is undertaken, discomfort increases. |

[0143] In certain embodiments, NYHA class III patient receiving rAAV administration as disclosed herein is improved to NYHA class II patient after 1 month, or, 2 months, or, 3 months, or, 4 months, or 5 months, or, 6 months, or, 7 months, or, 8 months, or, 9 months or, 12 months or, more months of post administration of rAAV dose. In other embodiments, NYHA class II patient receiving rAAV administration as disclosed herein is improved to NYHA class I patient after 1 month, or, 2 months, or, 3 months, or, 4 months, or 5 months, or, 6 months, or, 7 months, or, 8 months, or, 9 months or, 12 months or, more months of post administration of rAAV dose. In some embodiments, NYHA class III patient receiving rAAV administration as disclosed herein is improved to NYHA class I patient after 1 month, or, 2 months, or, 3 months, or, 4 months, or 5 months, or, 6 months, or, 7 months, or, 8 months, or, 9 months or, 12 months or, more months of post administration of rAAV dose. In some embodiments, NYHA class IV patient receiving rAAV administration as disclosed herein is improved to NYHA class III patient or, NYHA class II patient after 1 month, or, 2 months, or, 3 months, or, 4 months, or 5 months, or, 6 months, or, 7 months, or, 8 months, or, 9 months or, 12 months or, more months of post administration of rAAV dose.

### (Ii) ACC/AHA Classification:

[0144] One heart failure classification system useful in the methods disclosed herein is the ACC/AHA classification system. The American College of Cardiology (ACC) and the American Heart Association (AHA) worked together to create another classification system that complements the NYHA approach. It considers people who do not yet have HF but are at high risk for developing it.

[0145] The ACC/AHA classifies heart failure on the disease progression, and classifies HF in stages A, B, C, D according to presence of HF symptoms and signs and cardiac structural changes. See, e.g., Yancy CW, et al., Circulation 2013;128: e240-e327, and Hunt SA, et al., Circulation 2001;104:2996-3007.

[0146] The American College of Cardiology/American Heart Association (ACC/AHA) staging system defines four stages:
[0147] Stage A: High risk of heart failure but no structural heart disease or symptoms of heart failure (pre-heart failure)
[0148] Stage B: Structural heart disease but no symptoms of heart failure (pre-heart failure)
[0149] Stage C: Structural heart disease and symptoms of heart failure
[0150] Stage D: Refractory heart failure requiring specialized interventions

[0151] Table 1B: AHA/ACC 2013 - Staging System of the heart

| | | |
|---|---|---|
| Stage | Description | Examples |
| A | Presence of heart failure risk factors but no heart disease and no symptoms. Encompasses “pre heart | CAD (coronary artery disease), diabetes, hypertension, metabolic syndrome, |
| | failure” where intervention with management can overt progression to symptoms. | obesity, using cardiotoxins or alcohol, family history of cardiomyopathy, cerebrovascular accident (CVA), personal history of rheumatic fever. |
| B | People with structural heart disease but there are no signs or symptoms of heart failure (structural changes in heart before symptoms occur) | Left ventricular hypertrophy (LVH) or reduced left ventricular ejection fraction (LVEF), asymptomatic valvular heart disease, previous MI |
| | NYHA class I | |
| C | People with structural heart disease with prior or current symptoms of heart failure (symptoms have or are occurring) | Known structural heart disease with dyspnea (shortness of breath), fatigue, inability to exercise or reduced exercise tolerance |
| | NYHA class II and III | |
| D | People with advanced heart failure and severe symptoms or continued heart failure with severe symptoms difficult to manage with standard treatment or the patient requiring aggressive medical therapy. | Marked symptoms of rest despite maximal medical therapy, and recurrent hospitalizations |
| | NYHA class IV | |

[0152] The stages denote the level of risk for developing heart failure on through the development of advanced heart failure. The stages are progressive and correlated to treatment plans. As heart failure worsens, the condition advances to the next stage. There is no reverting back through the stages. With treatment, progression through the stages may be delayed. Diagnostic considerations include evaluating when heart failure starts, where it develops, how it impairs function, and whether or not it can be effectively managed with treatment.

[0153] In certain embodiments, ACC/AHA Stage D patient receiving rAAV administration as disclosed herein is improved to ACC/AHA Stage C patient after 1 month, or, 2 months, or, 3 months, or, 4 months, or 5 months, or, 6 months, or, 7 months, or, 8 months, or, 9 months or, 12 months or, more months of post administration of rAAV dose. In other embodiments, ACC/AHA Stage C patient receiving rAAV administration as disclosed herein is improved to ACC/AHA Stage B patient after 1 month, or, 2 months, or, 3 months, or, 4 months, or 5 months, or, 6 months, or, 7 months, or, 8 months, or, 9 months or, 12 months or, more months of post administration of rAAV dose. In some embodiments, ACC/AHA Stage D patient receiving rAAV administration as disclosed herein is improved to ACC/AHA Stage C or B patient or, ACC/AHA Stage A patient after 1 month, or, 2 months, or, 3 months, or, 4 months, or 5 months, or, 6 months, or, 7 months, or, 8 months, or, 9 months or, 12 months or, more months of post administration of rAAV dose. In some embodiments, ACC/AHA Stage C patient receiving rAAV administration as disclosed herein is improved to ACC/AHA Stage B or stage A patient after 1 month, or, 2 months, or, 3 months, or, 4 months, or 5 months, or, 6 months, or, 7 months, or, 8 months, or, 9 months or, 12 months or, more months of post administration of rAAV dose.

[0154] Table 1C: Comparison of the NYHA classification and the ACC/AHA guidelines (obtained from Haselhuhn et al., Cleveland Clinic Journal of Medicine February 2019, 86 (2) 123-139.)

| NYHA class I | NYHA class II | NYHA class III | NYHA class IV |
|---|---|---|---|
| No physical limitations | Slight limitation of physical activity | Marked limitation of physical activity | Symptoms at rest |
| Stage A | Stage B | Stage C | Stage D |
| Patients at risk for heart failure | Structural disease | Structural disease | End-stage disease |
| | No heart failure symptoms | Heart failure symptoms | |

[0155] In some embodiments, the ACCF/AHA guidelines for the management of heart failure can also be used, which are developed in collaboration with the American Academy of Family Physicians, American College of Chest Physicians, and the International Society for Heart and Lung Transplant, disclosed in Yancy, Clyde W., et al. “2017 ACC/AHA/HFSA focused update of the 2013 ACCF/AHA guideline for the management of heart failure: a report of the American College of Cardiology/American Heart Association Task Force on Clinical Practice Guidelines and the Heart Failure Society of America.” Journal of the American College of Cardiology 70.6 (2017): 776-803, which is incorporated herein in its entirety by reference. The 2017 focused update of the 2013 ACC/AHA guideline on heart failure contains important recommendations on prevention, novel biomarker uses, heart failure with preserved ejection fraction (HFpEF), and comorbidities such as hypertension, iron deficiency, and sleep-disordered breathing. Potential implications for management of acute decompensated heart failure will also be explored (see, e.g., Haselhuhn et al., Cleveland Clinic Journal of Medicine February 2019, 86 (2) 123-139.

### (III) 2016 European Society of Cardiology Guidelines (ESCG),

[0156] The 2016 European Society of Cardiology guidelines is disclosed in Piepoli et al., Eur Heart J. 2016 Aug 1;37(29):2315-2381, which is incorporated herein by reference, and is encompassed for use in the methods to treat HF disclosed herein, as an alternative to, or to complement the NYHA or ACC/AHA guidelines.

### (IV) Japanese Heart Failure Society (JHFS) Guidelines,

[0157] The Japanese Circulation Society (JCS) Guidelines are disclosed in Yamamoto K, et al., Japanese Heart Failure Society 2018 Scientific Statement on Nutritional Assessment and Management in Heart Failure Patients. Circ J. 2020 Jul 22;84(8):1408-1444, and is encompassed for use in the methods to treat HF disclosed herein, as an alternative to, or to complement the NYHA or ACC/AHA guidelines.

### (V) Kansas City Cardiomyopathy Questionnaire (KCCQ) Scores

[0158] KCCQ scores are scaled from 0 to 100 and frequently summarized in 25-point ranges, where scores represent health status as follows: 0 to 24: very poor to poor; 25 to 49: poor to fair; 50 to 74: fair to good; and 75 to 100: good to excellent as described in Spertus JA et al., JACC, Volume 76, Issue 20, 17 Nov. 2020, Pages 2379-2390. Because the most common means of quantifying health status in clinical practice and trials is the NYHA functional class, it is valuable to appreciate what KCCQ scores correlate to which NYHA functional class. About 85% of patients with scores of 0 to 24 are NYHA functional class III/IV; 60% of patients with scores of 25 to 49 are NYHA functional class III; one-half of patients with scores of 50 to 75 are NYHA functional class III and one-half are NYHA functional class II; and of those with scores over 75, over 80% are NYHA functional class I or II.

### (VI) Other Heart Failure Classification Systems:

[0159] Ejection Fraction: Classifies HF in HFrEF, HFmrEF, HFpEF based on left ventricular ejection fraction Ponikowski P, et al., Eur J Heart Fail 2016;18:891-975.

[0160] Aetiology: Classifies HF in stages specific aetiology of HF, e.g. ischaemic/non-ischaemic, valvular, hypertensive, infiltrative cardiomyopathy such as cardiac amyloidosis, peripartum cardiomyopathy, viral myocarditis, chemotherapy-induced cardiomyopathy, as disclosed in Yancy CW, et al., Circulation 2013;128:e240-e327 and Ponikowski P, et al., Eur J Heart Fail 2016; 18:891-975.

[0161] MOGES: classifies HF in levels of a morpho-functional phenotype (M), organ(s) involvement (O), genetic inheritance pattern (G), etiological annotation (E) including genetic defect or underlying disease/substrate, and the functional status (S). See, e.g., Arbustini E, et al., The MOGE(S) classification of cardiomyopathy for clinicians. J Am Coll Cardiol 2014;64:304-318.

[0162] INTERMACS (profiles of advanced HF): Classifies HF as Profiles 1 through 7 according to symptoms, functional capacity, haemodynamic stability for patients who are considered for advanced HF therapies. See, e.g., Stevenson LW, et al., INTERMACS profiles of advanced heart failure: the current picture. J Heart Lung Transplant 2009;28:535-541.

### (VII) Quality of Life (QOF) Questionnaires:

[0163] Assessment of heart failure can be categorized or classified using a variety of self-assessed questionnaires, e.g., selected from any of: Minnesota LIVING WITH HEART FAILURE® Questionnaire (MLHFQ, also known as MLWHF, LHFQ, MQOL)), (Rector et al.,); Chronic Heart failure Questionnaire (CHFQ, CHQ) (Guyatt et al., 1989); Quality of Life Questionnaire for Severe Heart Failure (QLQ-SHF or QQL-SHF) (Wiklund et al., 1987), Kansas city cardiomyopathy Questionnaire (KCCQ) (Spertus et al, 1999), and Left Ventricular Dysfunction Questionnaire-36 (LVD-36) (O′Learly et al., 1998), each of which are reviewed in Garin, Olatz, et al. “Disease-specific health-related quality of life questionnaires for heart failure: a systematic review with meta-analyses.” Quality of Life Research 18.1 (2009): 71-85, and Garin, O., et al. Assessing health-related quality of life in patients with heart failure: a systematic, standardized comparison of available measures. Heart Fail Rev 19, 359-367 (2014), each of which are incorporated herein in their entirety by reference.

[0164] In some embodiments, a clinically meaningful change in a Quality of Life (QOL) questionnaire is a 10 point decrease, or greater than 10 point decrease in the QOF Questionnaire score measured at least 6-months, or at least 12-months after administration of the rAAV according to the methods as disclosed herein, as compared to the QOF Questionnaire score prior to administration of the rAAV to the subject. In some embodiments, a clinically meaningful change in a Quality of Life (QOL) questionnaire score is a 10-point decrease, or a 11-point decrease, or a 12-point decrease, or a 13-point decrease, or a 14-point decrease, or a 15-point decrease, or a 16-point decrease, or a 17-point decrease, or a 18-point decrease, or a 19-point decrease, or a 20-point decrease, or a 21 point decrease, or 22 point decrease, or 23 point decrease, or 24 point decrease, or 25 point decrease, or a greater than 25-point decrease in a QOL Questionaire score e.g., in KCCQ score or, in MLWHF score measured at least 3 months, or, at least 6-months, or at least 12-months after administration of the rAAV according to the methods as disclosed herein, as compared to the ESV prior to administration of the rAAV to the subject.

### (VI) Measurements for Evaluation of Treatment:

[0165] In some embodiments, the methods to treat HF as disclosed herein improvement in the at least one parameter from a baseline level in the patient, where the at least one parameter is selected from the group consisting essentially of: (i) ejection fraction (EF or, interchangeably used as Left ventricular ejection fraction or, LVEF), (ii) end systolic volume (ESV), (iii) cardiac contractility, selected from ejection fraction (EF) and fractional shortening (FS), (iv) cardiac volumes selected from any of: end diastolic volume (DV) and end systolic volume (ESV), (iv) functional criteria, selected from any of: a 6-minute walk test (6MWT), exercise and VO2max (also referred to as pVO2max or myocardial oxygen consumption (MVO2) (measured in ml/kg/min); (v) BNP level, (vi) Pro-BNP level, (vii) biomarker level, wherein the biomarker level is selected from the group of: troponin, serum creatinine, cystatin-C, or hepatic transaminases, (viii) patient-reported outcomes (PROs), such as reduced symptoms, health-related quality of life (HRQOL), or patient perceived health status, and (ix) a decrease in any of: mortality risk due to heart failure, reduced hospitalization due to heart failure symptoms, or therapeutic intervention for treatment of HF.

[0166] In some embodiments, a clinically meaningful change in End Systolic Volume (ESV) is a 10% decrease, or greater than 10% decrease in ESV measured at least 1 month or, at least 3 months, or, at least 6-months, or at least 12-months after administration of the rAAV according to the methods as disclosed herein, as compared to the ESV prior to administration of the rAAV to the subject. In some embodiments, a clinically meaningful change in ESV is a 10% decrease, or about 11%, or about 12%, or about 13%, or about 14%, or about 15%, or greater than a 15% decrease in ESV measured at least 3 months, or at least 6-months, or at least 12-months after administration of the rAAV according to the methods as disclosed herein, as compared to the ESV prior to administration of the rAAV to the subject. In some embodiments, a clinically meaningful change in End Systolic Volume (ESV) is a 20 ml decrease, or greater than 20 ml decrease in ESV measured at least 1 month, or, at least 3 months, or, at least 6-months, or at least 12-months after administration of the rAAV according to the methods as disclosed herein, as compared to the ESV prior to administration of the rAAV to the subject.

### (A) BNP Level and NT-Pro-BNP Level

[0167] In some embodiments, the method of treatment as disclosed herein can be assessed by measuring biomarkers, such as, e.g., circulating natriuretic peptide (either BNP or NT-proBNP) levels in the serum obtained from the subject after a pre-defined period of time, such as, for example, at least about 1, or 2, or 3, or 4, or 5, or 6, or 9, or, 12, or more months after administration. In some embodiments, the method of treatment or administration as disclosed herein can be assessed by measuring BNP and/or NT-proBNP levels in the serum before administration, and after a period of about 4-6 months, or after 6-months after administration, or after more than 6-months post-administration.

[0168] Methods to measure NT-proBNP levels are well known in the art. Acute heart failure (AHF) is unlikely if the level of BNP in the serum from the subject is equal or less than 100 pg/ml or if the NT-proBNP in the serum from the subject is equal or less than 300 pg/ml. A diagnosis of HF is likely where the level of BNP in the serum from the subject is >400 pg/ml or if the NT-proBNP in the serum from the subject is >450 pg/ml for subjects less than 50 years of age, or > 900 pg/ml for subjects between 50-75 years of age, or > 1800 pg/ml for subjects >75 years of age.

[0169] Accordingly, in some embodiments, a BNP level of equal or less than 400 pg/ml in the serum of a treated patient at least 6 months after administration indicates effective treatment.

[0170] In some embodiments, a NT-proBNP level of equal or less than 450 pg/ml in the serum of a treated patient of less than 50 years of age at least 6 months after administration indicates effective treatment. In some embodiments, a NT-proBNP level of equal or less than 900 pg/ml in the serum of a treated patient of 50-75 years of age at least 6 months after administration indicates effective treatment. In some embodiments, a NT-proBNP level of equal or less than 1700 pg/ml in the serum of a treated patient of ≥75 years of age at least 6 months after administration indicates effective treatment.

[0171] In some embodiments, a clinically meaningful change in NT-pro-BNP (pg/ml) is a 35% decrease, or greater than 35% decrease in the level of NT-pro-BNP (pg/ml) measured at least 1 month, at least 3 months, or, at least 6-months, or at least 12-months after administration of the rAAV according to the methods as disclosed herein, as compared to the level of level of NT-pro-BNP (pg/ml) measured prior to administration of the rAAV to the subject. In some embodiments, a clinically meaningful change in NT-pro-BNP (pg/ml) is a 35% decrease, or about a 36%, or about a 37%, or about a 38%, or about a 39%, or about a 40%, or about a 40-45% or about a 46-50% decrease or a greater than a 50% decrease in the level of NT-pro-BNP (pg/ml) measured at least 1 month or, at least 3 months, or, at least 6-months, or at least 12-months after administration of the rAAV according to the methods as disclosed herein, as compared to the level of of NT-pro-BNP (pg/ml) measured prior to administration of the rAAV to the subject.

[0172] In some embodiments, a decrease of about 10%, or about 15%, or about 20%, or about 25%, or about 30% or >30% in BNP levels or NT-proBNP levels in the serum of a subject at least 3- months, or at least about 6-months after administration of the rAAV of as compared to levels of BNP or NT-proBNP levels pre-administration is indicative of effective treatment. In some embodiments, a decrease of about 0.1-fold, 0.2-fold, 0.3-fold, 0.4-fold, 0.5-fold, 0.6-fold, 0.7-fold, 0.8-fold, 0.9-fold, 1.0-fold, 1.1-fold, 1.2-fold, 1.3-fold, 1.4-fold, 1.5-fold, 1.6-fold, 1.7-fold, 1.8-fold, 1.9-fold, or 2.0-fold, or greater of 2.0-fold in the serum level of BNP or NT-proBNP in a subject at least 3- months, or at least about 6-months after administration of the rAAV of as compared to levels of BNP or NT-proBNP levels pre-administration is indicative of effective treatment.

[0173] In some embodiments, an effective treatment is considered if the serum level of BNP in a subject (of any age) is less than 400 pg/ml, or about 350 pg/ml, or about 300 pg/ml, or about 250 pg/ml, or about 200 pg/ml, or about 150 pg/ml, or about 100 pg/ml, or less than 100 pg/ml at least 3- months, or at least about 6-months after administration of the rAAV of as compared to levels of BNP levels pre-administration.

[0174] In some embodiments, an effective treatment is considered if the serum level of NT-proBNP in a subject aged less than 50 years of age is less than 450 pg/ml, or about 400 pg/ml, or about 350 pg/ml, or about 300 pg/ml, or about 250 pg/ml, or about 200 pg/ml, or about 150 pg/ml, or about 100 pg/ml, or less than 100 pg/ml at least 3- months, or at least about 6-months after administration of the rAAV of as compared to levels of NT-proBNP levels pre-administration. In some embodiments, the age of the patient being treated is less than 50 years of age, or, between 50-75 years of age, or, ≥75 years of age.

[0175] In some embodiments, an effective treatment is considered if the serum level of NT-proBNP in a subject aged between 50-75 years of age is less than 900 pg/ml, or about 850 pg/ml, or about 800 pg/ml, or about 750 pg/ml, or about 700 pg/ml, or about 650 pg/ml, or about 600 pg/ml, or about 550 pg/ml, or about 500 pg/ml, or about 450 pg/ml, or less than 450 pg/ml at least 3- months, or at least about 6-months after administration of the rAAV of as compared to levels of NT-proBNP levels pre-administration. In some embodiments, the age of the patient being treated is less than 50 years of age, or, between 50-75 years of age, or, ≥75 years of age.

[0176] In some embodiments, an effective treatment is considered if the serum level of NT-proBNP in a subject aged ≥75 years of age is less than about 1800 pg/ml, or about 1700 pg/ml, or about 1600 pg/ml, or about 1500 pg/ml, or about 1400 pg/ml, or about 1300 pg/ml, or about 1200 pg/ml, or about 1100 pg/ml, or about 1000 pg/ml, or about 900 pg/ml, or about 800 pg/ml, or about 700 pg/ml, or about 600 pg/ml, or about 500 pg/ml, or about 450 pg/ml or less than 450 pg/ml at least 3- months, or at least about 6-months after administration of the rAAV of as compared to levels of NT-proBNP levels pre-administration. In some embodiments, the age of the patient being treated is less than 50 years of age, or, between 50-75 years of age, or, ≥75 years of age.

[0177] In some embodiments, a clinically meaningful change in BNP (pg/ml) is a 40% decrease, or greater than 40% decrease in the level of BNP (pg/ml) measured at least 6-months, or at least 12-months after administration of the rAAV according to the methods as disclosed herein, as compared to the level of BNP (pg/ml) measured prior to administration of the rAAV to the subject. In some embodiments, a clinically meaningful change in BNP (pg/ml) is a 40% decrease, or about a 41%, or about a 42%, or about a 43%, or about a 44%, or about a 45%, or about a 45-50% or about a 51-55% decrease, or a 56-60% decrease or a greater than a 60% decrease in the level of BNP (pg/ml) measured at least 1 month or, at least 3 months, or at least 6-months, or at least 12-months after administration of the rAAV according to the methods as disclosed herein, as compared to the level of level of BMP (pg/ml) measured prior to administration of the rAAV to the subject.

### (B) Ejection Fraction (EF) (also Interchangeably Used With Left Ventricle Ejection Fraction (LVEF))

[0178] In some embodiments, cardiopulmonary exercise testing can be assessed using a modified Bruce protocol according to methods known in the art. An observed and change from baseline in Echocardiographic assessment in Left Ventricular Ejection Fraction (LVEF) can also be used to assess the treatment, where the LVEF can be assessed at the following timepoints: before administration, 18-24 hours post administration, after 4 weeks, at about 6 months, and at about 12 months-post administration.

[0179] In some embodiments, a clinically meaningful change in Ejection Fraction (EF) is a 5% increase, or greater than 5% increase in ejection fraction measured at least 1 month, or, at least 3 months, at least 6-months, or at least 12-months after administration of the rAAV according to the methods as disclosed herein, as compared to the ejection fraction (EF) prior to administration of the rAAV to the subject. In some embodiments, a clinically meaningful change in Ejection Fraction (EF) is a 5% increase, or about 6%, or about 7%, or about 8%, or about 9%, or about 10%, or greater than a 10% increase in ejection fraction measured at least 1 month, or, at least 3 months, at least 6-months, or at least 12-months after administration of the rAAV according to the methods as disclosed herein, as compared to the ejection fraction (EF) prior to administration of the rAAV to the subject.

[0180] In some embodiments, the improved function may be an improvement of any amount as compared to the cardiac function of a matched control subject receiving vehicle only. For example, the improvement (i.e., increase) in LVEF at least 3- or at least 6-months after administration of a rAAV vector according to the methods disclosed herein be about 10%, 20%, 30%, 40%, 50%, 60%, 70%, 80%, 90%, 100%, 150%, 200% or more than about 200% as compared to the LVEF measured at or before the rAAV administration.

[0181] In another example, the improvement in E/A ratio after treatment may be about 10%, 20%, 30%, 40%, 50%, 60%, 70%, 80%, 90%, 100%, 150%, 200% or more than about 200% as compared to the E/A ratio measured at or before the rAAV administration. In yet another example, the improvement in left atrial volume (LAV) may be about 10%, 20%, 30%, 40%, 50%, 60%, 70%, 80%, 90%, 100%, 150%, 200% or more than about 200% as compared to the level of LAV measured at or before the rAAV administration.

[0182] In some embodiments, if the LVEF is preserved ≥50%, or at least 55%, or at least 60% or more than 60% as compared to the level of LVEF measured, at and/or before administration of the rAAV according to the methods as disclosed herein, then the rAAV vector and the administration methods is considered an effective treatment (e.g., see Dokainish, Glob Cardiol Sci Pract. 2015; 2015: 3). Typically, a normal LVEF ranges from 50% to 75%, and a LVEF of below 53% for women and 52% for men is considered low, and a subject with a LVEF of 49% or less, or about 45%, or about 40%, or about 36%, or between 36-49% is indicative of heart failure. In some embodiments, an increase in LVEF measured in the subject by at least 1%, or about 2%, or about 3%, or about 4%, or about 5%, or about 6%, or about 7%, or about 8%, or about 9%, or about 10%, or about 15%, or about 20% or about 35%, or about 40%, or about 45%, or about 50% or more than 50% as compared to the LVEF measured at, or before administration of a rAAV according to the methods as disclosed herein is indicative of an effective treatment. For example, in an illustrative embodiment, if the subject has a LVEF of 36% measured at, or before administration of the rAAV vector according to the methods as disclosed herein, an increase in LVEF by at least 1% to 37% LVEF, or about 2% to 38% LVEF, or about 3% to 39% LVEF, or about 4% to 40% LVEF, or about 5% to 41% LVEF, or about 6% to 42% LVEF, or about 7% to 43% LVEF, or about 8% to 44% LVEF, or about 9% to 45% LVEF, or about 10% to 46% LVEF, or about 15% to 51% LVEF, or about 20% to 56% LVEF or about 25% to 61% LVEF, as measured at least 3- months, or at least about 6-months after administration of the rAAV is indicative of an effective treatment.

### (C) End Systolic Volume (ESV)/left Ventricle End Systolic Dimension (LVESD) and End Diastolic Volumes (DV)/ Left Ventricle End Diastolic Dimension (LVEDD)

[0183] In one embodiment, the methods also include administration of a rAAV vector as disclosed herein, according to the methods as disclosed herein, to attenuate cardiac remodeling. Cardiac remodeling may be measured by any method known in the art, including the methods, such as, e.g., echocardiography. As an example, left ventricle chamber size may be used as a measure for cardiac remodeling. In evaluating attenuation of cardiac remodeling, an attenuation of the increase in size of the left ventricle may be an attenuation of any amount as compared with the left ventricle size before administration of a rAAV vector as disclosed herein, according to the methods as disclosed herein.

[0184] In some embodiments, a clinically meaningful change in End Systolic Volume (ESV) is a 10% decrease, or greater than 10% decrease in ESV measured at least 1 month, or, at least 3 months, at least 6-months, or at least 12-months after administration of the rAAV according to the methods as disclosed herein, as compared to the ESV prior to administration of the rAAV to the subject. In some embodiments, a clinically meaningful change in ESV is a 10% decrease, or about 11%, or about 12%, or about 13%, or about 14%, or about 15%, or greater than a 15% decrease in ESV measured at least 1 month, or, at least 3 months, at least 6-months, or at least 12-months after administration of the rAAV according to the methods as disclosed herein, as compared to the ESV prior to administration of the rAAV to the subject.

[0185] In some embodiments, a clinically meaningful change in End Systolic Volume (ESV) is a 20 ml decrease, or greater than 20 ml decrease in ESV measured at least 1 month, or, at least 3 months, at least 6-months, or at least 12-months after administration of the rAAV according to the methods as disclosed herein, as compared to the ESV prior to administration of the rAAV to the subject. In some embodiments, a clinically meaningful change in ESV is a 20 ml decrease, or about 22 ml, or about 23 ml or about 24 ml, or about 25 ml, or about 26 ml, or about 27 ml, or about 28 ml, or about 29 ml, or about 30 ml, or greater than a 30 ml decrease in ESV measured at least 1 month, or, at least 3 months, at least 6-months, or at least 12-months after administration of the rAAV according to the methods as disclosed herein, as compared to the ESV prior to administration of the rAAV to the subject.

[0186] In some embodiments, an attenuation of the increase in size of the left ventricle may be an attenuation of any amount as compared with the left ventricle size of a matched control subject receiving vehicle only. Left ventricle chamber size may be measured, for example, by assaying left ventricle end diastolic dimension (LVEDD) or left ventricle end systolic dimension (LVESD). In an example, the change in LVEDD at least 3- or at least 6-months after administration with a rAAV vector as disclosed herein, according to the methods as disclosed herein may be 10%, 20%, 30%, 40%, 50%, 60%, 70%, 80%, 90%, 100%, 150%, 200% or more than about 200% as compared to the levels measured at, or before administration of the rAAV. In another example, the change in LVESD at least 3- or at least 6-months after administration with a rAAV vector as disclosed herein, according to the methods as disclosed herein may be 10%, 20%, 30%, 40%, 50%, 60%, 70%, 80%, 90%, 100%, 150%, 200% or more than about 200% as compared to the LVESD level measured at, or before administration of the rAAV.

### (d)VO2max (Also Referred to as pVO2max or Myocardial Oxygen Consumption (MVO₂)

[0187] In one embodiment, the methods also include administration of a rAAV vector as disclosed herein, according to the methods as disclosed herein, to improve exercise capacity in a subject having congestive heart failure. The improvement in exercise capacity may be measured by any method known in the art. For example, the improvement in exercise capacity may be measured by assaying peak VO₂ uptake or exercise capacity to peak lactate ratio. Peak oxygen uptake during exercise may be measured, for example, by indirect calorimetry. In an example, the change in exercise capacity to peak lactate ratio measured at least 3- or at least 6-months after administration with a rAAV vector as disclosed herein, according to the methods as disclosed herein may be 10%, 20%, 30%, 40%, 50%, 60%, 70%, 80%, 90%, 100%, 150%, 200% or more than about 200% as compared to the peak lactate ratio measured at, or before administration of the rAAV.

[0188] In some embodiments, a clinically meaningful change in myocardial oxygen consumption (MVO₂) is a 1.5 ml/kg/min increase, or greater than 1.5 ml/kg/min increase in MVO₂ measured at least 1 month, or, at least 3 months, at least 6-months, or at least 12-months after administration of the rAAV according to the methods as disclosed herein, as compared to the MVO₂ measured prior to administration of the rAAV to the subject. In some embodiments, a clinically meaningful change in MVO₂ is a 1.5 ml/kg/min increase, 1.6 ml/kg/min, or about a 1.7 ml/kg/min, or about 1.8 ml/kg/min, or about 1.9 ml/kg/min, or about 2.0 ml/kg/min, or about 2.1 ml/kg/min, or greater than a 2.1 ml/kg/min increase in MVO₂ measured at least 1 month, or, at least 3 months, at least 6-months, or at least 12-months after administration of the rAAV according to the methods as disclosed herein, as compared to the MVO₂ measured prior to administration of the rAAV to the subject.

[0189] In some embodiments, the method of treatment as disclosed herein can be assessed by measuring a peak oxygen update (VO₂), measured at least about 3, or 4, or 5, or 6 months or between 6-10 months, or 12 months after administration of the rAAV vector. In some embodiments, a modest pVO2 is indicative of an effect treatment - that is, a modest increase in peak VO₂ over 3 months was associated with a more favourable outcome. Accordingly, monitoring the change in peak VO₂ for treated subjects can be used to assess prognosis and therapeutic effect of the rAAV vector and method of administration. (Swank et al., Circulation: Heart Failure, Volume 5, Issue 5, September 2012, Pages 579-585). Every 6% increase in peak VO₂, adjusted for other significant predictors, was associated with a 5% lower risk of the primary end point (hazard ratio=0.95; CI=0.93-0.98; P<0.001) of all-cause mortality and all cause hospitalization; a 4% lower risk of the secondary end point of time to cardiovascular mortality or cardiovascular hospitalization (hazard ratio=0.96; CI=0.94-0.99; P<0.001); an 8% lower risk of cardiovascular mortality or heart failure hospitalization (hazard ratio=0.92; CI=0.88-0.96; P<0.001); and a 7% lower all-cause mortality (hazard ratio=0.93; CI=0.90-0.97; P<0.001). In some embodiments, post-administration peak VO₂ is increased from baseline peak VO₂ by about 2%, or, about 3%, or, about 4%, or, about 5%, or, about 6%, or, about 7%, or, about 8%, or, about 9%, or, about 10%, or, about 11%, or, about 12%, or, about 13%, or, about 14%, or, about 15%, or, about 16%, or, about 17%, or, about 18%, or, about 19%, or, about 20%, or, about 21%, or, about 22%, or, about 23%, or, about 24%, or, about 25%, or, about 26%, or, about 27%, or, about 28%, or, about 29%, or, about 30%. In some embodiments, post-administration peak VO₂ is increased from baseline peak VO₂ by at least 2%. In some embodiments, post-administration peak VO₂ is increased from baseline peak VO₂ by at least 5%. In other embodiments, post-administration peak VO₂ is increased from baseline peak VO₂ by at least 10%. In yet another embodiment, post-administration peak VO₂ is increased from baseline peak VO₂ by at least 20%. In certain embodiments, post-administration peak VO₂ is increased from baseline peak VO₂ by at least 30%. In some embodiments, post-administration peak VO₂ is increased from baseline peak VO₂ by about 1.1 fold, or, about 1.15 fold, or, about 1.2 fold, or, about 1.25 fold, or, about 1.3 fold, or, about 1.35 fold, or, about 1.4 fold, or, about 1.45 fold, or, about 1.5 fold, or, about 1.55 fold, or, about 1.6 fold, or, about 1.65 fold, or, about 1.7 fold, or, about 1.75 fold, or, about 1.8 fold, or, about 1.85 fold, or, about 1.9 fold, or, about 1.95 fold, or, about 2 fold, or, about 2.5 fold, or, about 3 fold, or, about 3.5 fold, or, about 4 fold, or, about 4.5 fold, or, about 5 fold, or, about 5.5 fold, or, about 6 fold, or, about 6.5 fold, or, about 7 fold, or, about 7.5 fold, or, about 8 fold, or, about 8.5 fold, or, about 9 fold, or, about 9.5 fold, or, about 10 fold. In certain embodiments, post-administration peak VO₂ is increased from baseline peak VO₂ by at least 1.1 fold, or, at least 1.2 fold, or, at least 1.5 fold, or, at least 2 fold, or, at least 2.5 fold, or, at least 3 fold, or, at least 3.5 fold, or, at least 4 fold, or, at least 4.5 fold, or, at least 5 fold, or, at least 6 fold, or, at least 6.5 fold, or, at least 7 fold, or, at least 8 fold, or, at least 9 fold, or, at least 10 fold, or, at least 11 fold, or, at least 12 fold, or, at least 13 fold, or, at least 14 fold, or, at least 15 fold, or, at least 16 fold, or, at least 17 fold, or, at least 18 fold, or, at least 19 fold, or, at least 20 fold, or, at least 22 fold, or, at least 25 fold, or, at least 30 fold, or, at least 35 fold, or, at least 40 fold, or, at least 45 fold or, at least 50 fold.

[0190] In evaluating improved cardiac function associated with congestive heart failure, the improved function may be an improvement of any amount as compared with the cardiac functioning prior to administration of a rAAV vector as disclosed herein, according to the methods as disclosed herein.

### (E) 6 Minute Walk Test (6MWT)

[0191] In some embodiments, the method of treatment as disclosed herein can be assessed by measuring secondary outcome measures, e.g., assessing the subject in a 6-minute walk distance test (referred to as a 6-minute walk test (6MWT) at the following timepoints: before administration, 18-24 hours post administration, after 4 weeks, at about 6 months, and at about 12 months-post administration. In certain embodiments, the 6-minute walk test (6MWT) can be performed at any of the above time points is improved from the baseline at least by 15 m, or, at least by 20 m, or at least by 25 m, or, at least by 30 m, or at least by 40 m, or, at least by 50 m, or, at least by 55 m, or, at least by 60 m, or, at least by 65 m, or, at least by 70 m, or, at least by 75 m, or, at least by 80 m, or, at least by 85 m, or, at least by 90 m, or, at least by 100 m, or, at least by 120 m, or, at least by 150 m, or, at least by 170 m, or at least by 180 m, or at least by 200 m, or more.

[0192] In some embodiments, a clinically meaningful change in the 6MWT is a 50 meters increase, or greater than 50 meter increase in the distance walked in the 6MWT measured at least 1 month, or, at least 3 months, at least 6-months, or at least 12-months after administration of the rAAV according to the methods as disclosed herein, as compared to the distance walked in the 6MWT prior to administration of the rAAV to the subject. In some embodiments, a clinically meaningful change in the 6MWT is a 50 meter increase, or an increase of about 60 m, or about 70 m, or about 80 m, or about 90 m, or about 100 m, or about 110 m, or about 120 m, or about 130 m, or about 140 m, or about 150 m, or an increase of greater than 150 meters in the distance walked in the 6MWT measured at least 1 month, or, at least 3 months, at least 6-months, or at least 12-months after administration of the rAAV according to the methods as disclosed herein, as compared to the distance walked in the 6MWT prior to administration of the rAAV to the subject.

[0193] Such a 6MWT can be conducted according to the methods as disclosed in Giannitsi et al., Ther Adv Cardiovas Disorders, 2019, 2019; 13: 1753944719870084, which is incorporated herein in its entirety by reference.

### (ƒ) Cardiac Contractibility, Including Fractional Shortening (FS) and Ejection Fraction (EF)

[0194] In one embodiment, the methods also include administration of a rAAV vector as disclosed herein, according to the methods as disclosed herein, to improve cardiac contractility. Improving cardiac contractility may include any increase in the number of cardiac myocytes available for contraction, the ability of cardiac myocytes to contract, or both. In order to evaluate the improvement of cardiac contractility, any mode of assessment may be used. For example, clinical observation, such as an increase in cardiac output or a decrease in cardiac rate or both, may lead to a determination of increased cardiac contractility. Alternatively, in vivo an increased contractility of the heart may be assessed by a determination of an increased fractional shortening of the left ventricle. Fractional shortening of the left ventricle may be observed by any available means such as echocardiograph.

[0195] In evaluating increased cardiac contractility, the increase in fractional shortening of the left ventricle may be an increase of any amount as compared with the fractional shortening before administration of a rAAV vector as disclosed herein, according to the methods as disclosed herein. For example, the increase in shortening measured at least 3- or at least 6-months after administration with a rAAV vector according to the methods as disclosed herein can about 10%, 20%, 30%, 40%, 50%, 60%, 70%, 80%, 90%, 100%, 150%, 200% or more than about 200% as compared to the levels of shortening measured at, or before the administration of rAAV. In a further aspect, prophylactic and therapeutic methods are provided. Treatment on an acute or chronic basis is contemplated. In addition, treatment on an acute basis may be extended to chronic treatment, if so indicated. In one aspect is provided a method for the treatment or prevention of a condition associated with congestive heart failure in a subject in need thereof. The method generally comprises administering to the subject an amount of rAAV vector as disclosed herein, according to the methods as disclosed herein, effective to prevent or ameliorate congestive heart failure, wherein the condition associated with congestive heart failure is thereby improved.

[0196] In some embodiments, the rAAV vector expresses an I-1 protein or a functional variant thereof as disclosed herein in the heart of the subject in an amount effective to increase cardiac contractility and reduce morphological deterioration associated with cardiac remodeling in the subject with existing heart failure. In some embodiments, the increase in contractility is determined by increased myocyte shortening (myocyte length change), rates of myocyte cell shortening (dL/dt) and relengthening (-dL/dt), a lower time constant for relaxation (tau(.tau.)), and accelerated calcium signal decay.

[0197] In yet another embodiment, the methods further comprise the identification of a subject in need of treatment. Any effective criteria may be used to determine that a subject may benefit from administration of a rAAV vector as disclosed herein, according to the methods as disclosed herein. Methods for the diagnosis of heart disease and diabetes, for example, as well as procedures for the identification of individuals at risk for development of these conditions, are well known to those in the art. Such procedures may include clinical tests, physical examination, personal interviews and assessment of family history.

### (G) Biomarkers:

[0198] Biomarkers from blood can help detect the presence of HF, determine its severity, assess risk of future events, and guide the efficacy of the treatment of a rAAV according to the methods as disclosed herein. While BNP and Pro-BNP are commonly assessed biomarkers in classification of HF, other biomarkers can be used to further assess prognoses and effectiveness of a HF therapy.

[0199] In some embodiments, a panel of biomarkers can be used to assess efficacy of treatment, as disclosed in U.S. Pat. 8,450,069, which is incorporated herein in its entirety by reference, including measuring levels of cTnI and/or BNP in combination with one or more and vascular inflammation markers, e.g., IL-6, TNFα, IL-17a.

[0200] A number of biomarkers associated with HF are well recognized, and measuring their concentrations in circulation can be a convenient and non-invasive approach to provide important information about disease severity and helps in the detection, diagnosis, prognosis, and management of HF. These include natriuretic peptides, soluble suppressor of tumorgenicity 2, highly sensitive troponin, galectin-3, midregional proadrenomedullin, cystatin-C, interleukin-6, procalcitonin, and others. Accordingly, in some embodiments, a biomarker is selected from the group of: troponin, serum creatinine, cystatin-C, or hepatic transaminases. Measurement of these biomarkers are disclosed in Chow, et al. “Role of biomarkers for the prevention, assessment, and management of heart failure: a scientific statement from the American Heart Association.” Circulation 135.22 (2017): e1054-e1091, which is incorporated herein in its entirety..

[0201] In some embodiment, the biomarker is a miRNA. Some MicroRNAs biomarkers have been used and as they are stable in the circulation, selected miRNAs can be used as potential biomarkers in coronary artery disease, myocardial infarction, hypertension, diabetes mellitus, viral myocarditis, and HF. For instance, seven miRNAs were validated to be enriched in plasma of HF patients (miR-423-5p, miR-18b*, miR-129-5p, HS_202.1, miR-622, miR-654-3p, and miR-1254), among which miR-423-5p was most strongly related to the clinical diagnosis of HF. The circulating levels of miR-423-5p were related to disease severity as shown by an inverse correlation with ejection fraction and higher levels of miR-423-5p in patients with a higher New York Heart Association (NYHA) classification. MiR-423-5p was also correlated to the levels of the current clinically used biomarker N-terminal pro-brain natriuretic peptide (NT-proBNP). (see, e.g., Goren Y, Kushnir M, Zafrir B, Tabak S, Lewis BS, Amir O. Serum levels of microRNAs in patients with heart failure. Eur J Heart Fail 14: 147-154, 2012 and Tijsen AJ, et al., Circulating microRNAs as diagnostic biomarkers for cardiovascular diseases. Am J Physiol Heart Circ Physiol. 2012; 303:H1085-H1095).

[0202] Three other circulating miRNAs are linked to the diagnosis of HF. The endothelium-specific miR-126 was found to be negatively correlated with age, BNP, and NYHA class in 10 patients with and 17 asymptomatic controls (Fukushima Y, et al., Assessment of plasma miRNAs in congestive heart failure. Circ J 75: 336-340, 2011.8). Corsten et al. (Corsten MF, et al., Circulating MicroRNA-208b and MicroRNA-499 reflect myocardial damage in cardiovascular disease. Circ Cardiovasc Genet 3: 499-506, 2010.10) found both miR-499 and miR-122 to be enriched in the plasma of patients with acute HF compared with healthy controls, of which miR-499 is probably myocardium derived.

[0203] One of the characteristics of an ideal biomarker is changing levels as disease severity changes in response to therapy. miR-499-5p and miR-423-5p have been demonstrated to show the effect of therapy in a in a rat model of HF (Montgomery RL, et al., Therapeutic inhibition of miR-208a improves cardiac function and survival during heart failure. Circulation 124: 1537-1547, 2011).

[0204] In addition, miR-1, miR-133a, miR-133b, and miR-499-5p were elevated in patients with MI, whereas miR-122 and miR-375 were reduced (see, e.g., Tijsen AJ, et al., Circulating microRNAs as diagnostic biomarkers for cardiovascular diseases. Am J Physiol Heart Circ Physiol. 2012; 303:H1085-H1095).

[0205] In some embodiments, the protection against morphological deterioration associated with cardiac remodeling is determined by measuring the heart-to-body weight ratio, infarct size, and the presence of cardiac fibrosis, wherein protection is present if expression of said human phosphatase inhibitor-1 (I-1) or variant thereof results in a reduced heart-to-body weight ratio, a decreased infarct size, or reduced cardiac fibrosis as compared to a control.

[0206] In some embodiments, a subject treated with a rAAV vector and according to the administration methods as disclosed herein can be evaluated by assessing the effect of the treatment on a parameter related to cardiac function or cardiac cellular function, e.g., contractility. For example, SR Ca2+ ATPase activity or intracellular Ca2+ concentration can be measured, using the methods described above. Furthermore, force generation by hearts or heart tissue can be measured using methods described in Strauss et al., Am. J. Physiol., 262:1437-45, 1992.

[0207] In some embodiments, a subject treated with a rAAV vector and according to the administration methods as disclosed herein can also be evaluated by its effect on a subject, e.g., according to parameters that one skilled in the art of treatment would recognize as relevant for the particular treatment. For example, in treating heart failure, exemplary parameters may relate to cardiac and/or pulmonary function. Cardiac parameters include pulse, EKG signals, lumen loss, heart rate, heart contractility, ventricular function, e.g., left ventricular end-diastolic pressure (LVEDP), left ventricular systolic pressure (LVSP), Ca2+ metabolism, e.g., intracellular Ca2+ concentration or peak or resting Ca2+, force generation, relaxation and pressure of the heart, a force frequency relationship, cardiocyte survival or apoptosis or ion channel activity, e.g., sodium calcium exchange, sodium channel activity, calcium channel activity, sodium potassium ATPase pump activity, activity of myosin heavy chain, troponin I, troponin C, troponin T, tropomyosin, actin, myosin light chain kinase, myosin light chain 1, myosin light chain 2 or myosin light chain 3, IGF-1 receptor, PI3 kinase, AKT kinase, sodium-calcium exchanger, calcium channel (L and T), CK-MB, calsequestrin or calreticulin. The evaluation can include performing angiography (e.g., quantitative angiography) and/or intravascular ultrasound (IVUS), e.g., before, after, or during the treatment. In certain embodiments, echocardiographic assessments of LVEF, LVEVD, LVEDVI, VLESV, LVEVI, SpI, GLS or, degree of mitral regurgitation or, any combination of these or, all of these are performed at 4 weeks after, or, 6 weeks after, or, 8 weeks after, or, 12 weeks after, or, 3 months after, or, 6 months after, or, 9 months after, or, 12 months or, more months after administering the rAAV vector as described herein. In some embodiments, assessment of all-cause mortality and/or, Heart failure related hospitalization indicates the safety and/or, efficacy of the rAAV treatment as described herein. In some embodiments, survival, cardiac transplantation, or, left ventricular assist device (LAVD) implantation or, any combination of these are assessed in the monitoring of the rAAV administered patients.

[0208] In some embodiments of a method according to the invention, the rAAV vector is introduced in an amount effective to result in a condition selected from the group consisting of myocyte shortening, lowering of the time constant for relaxation, and accelerating calcium signal decay, and combinations thereof. In yet another embodiment, the rAAV vector is introduced in an amount effective to improve the end-systolic pressure dimension relationship or combinations thereof.

[0209] In some embodiments, the methods of administration and treatment as disclosed herein comprise expressing a therapeutic amount of the inhibitor of PP1 (I-1, or I-1c, or variant thereof) in the heart tissue of said subject. Suitably, expressing a therapeutic amount of the inhibitor of PP1 in the heart tissue reduces the symptoms of heart failure or a heart disorder of a subject. Suitably, expressing a therapeutic amount of the inhibitor of PP1 in the heart tissue may attenuate cardiac remodelling, improve exercise capacity, or improve cardiac contractility. Suitably, expressing a therapeutic amount of the inhibitor of PP1 in the heart tissue may result in myocyte shortening, lowering of the time constant for relaxation, and accelerating calcium signal decay, improving the end-systolic pressure dimension relationship and combinations thereof.

[0210] In still another embodiment, before, or after administration of the rAAV vector as disclosed herein, or both, the method further comprises evaluating a parameter of heart function in the subject. The parameter of heart function may, without limitation, be one or more of: heart rate, cardiac metabolism, heart contractility, ventricular function, Ca2+ metabolism, and sarcoplasmic reticulum Ca2+ ATPase activity.

### C. Exemplary Subjects to Be Treated With the rAAV Vector Disclosed Herein

[0211] As disclosed herein, the methods of administration and rAAV vectors disclosed herein can be used for treating a cardiovascular condition or heart disease, wherein the rAAV vector as disclosed herein is targeted to the heart of a patient whereby the nucleic acid sequence, e.g., inhibitor of PP1, or other therapeutic agents (e.g., an angiogenic protein or protein from Table 18A-18B) is expressed in the myocardium, thus ameliorating cardiac dysfunction by improving blood flow and/or improving cardiac contractile function. Improved heart function ultimately leads to the reduction or disappearance of one or more symptoms of heart disease or heart failure and prolonged life beyond the expected mortality.

[0212] Similarly, In some embodiments, the methods of administration and rAAV vectors disclosed herein can be used for the treatment of peripheral vascular disease, wherein the rAAV vector as disclosed herein is targeted to the heart of a patient whereby the nucleic acid sequence, e.g., inhibitor of PP1, or other therapeutic agents (e.g., an angiogenic protein) is targeted to the affected tissue, for example ischemic skeletal muscle, whereby expression of the therapeutic protein, e.g., inhibitor of PP1 or angiogenic protein ameliorates and/or cures symptoms of the peripheral vascular disease, for example by increasing blood flow to the affected (e.g., ischemic) region of the tissue and/or, in muscle, by improving contractile function of the affected muscle.

[0213] Thus, in some aspects, the technology described herein relates to methods of administration and rAAV vectors disclosed herein in a method for treating a cardiovascular condition or heart disease in a patient having myocardial ischemia, comprising administering the rAAV vector according to the administration methods disclosed herein to the myocardium of the patient by intracoronary injection, preferably by injecting the rAAV vector directly into one or both coronary arteries (or grafts), whereby the expression of the transgene (e.g., inhibitor of PP1 and/or angiogenetic protein) is expressed and blood flow and/or contractile function are improved. By way of illustration, a rAAV vector is delivered to the heart where the protein or peptide is produced to a therapeutically significant degree in the myocardium continuously for sustained periods, angiogenesis can be promoted in the affected region of the myocardium.

### Heart Failure:

[0214] Subjects amenable to treatment with the rAAV vectors as disclosed herein, and methods of administration as disclosed herein include, but are not limited to, a subject having heart failure, including congestive heart failure (CHF), who has a condition selected from the group consisting of ischemia, arrhythmia, myocardial infarction (MI), abnormal heart contractility, and abnormal Ca2+ metabolism, and combinations thereof, in addition to heart failure. In yet another embodiment, the subject is human. Among such patients suffering from congestive heart failure are those exhibiting dilated cardiomyopathy and those who have exhibited severe myocardial infarctions, typically associated with severe or occlusive coronary artery disease. In certain embodiments, the subjects, to be treated, have non-ischemic cardiomyopathy.

[0215] The definition of heart failure from the American College of Cardiology/American Heart Association (ACC/AHA), HFA/ESC, and JHFS guidelines classify heart failure as a clinical syndrome, and each definition is as follows:

### (I) Acute Heart Failure (AHF)

[0216] Acute Heart failure (AHF) refers to rapid onset or worsening of symptoms and/or signs of HF. It is a life-threatening medical condition requiring urgent evaluation and treatment, typically leading to urgent hospital admission. AHF may present as a first occurrence (de novo) or, more frequently, as a consequence of acute decompensation of chronic HF, and may be caused by primary cardiac dysfunction or precipitated by extrinsic factors, often in patients with chronic HF. Acute myocardial dysfunction (ischaemic, inflammatory or toxic), acute valve insufficiency or pericardial tamponade are among the most frequent acute primary cardiac causes of AHF. Decompensation of chronic HF can occur without known precipitant factors, but more often with one or more factors, such as infection, uncontrolled hypertension, rhythm disturbances or non-adherence with drugs/diet

[0217] People with acute heart failure (AHF) have no previous signs and symptoms of heart failure. AHF can present with rapid swelling and fluid retention characterized by sudden weight gain. Coughing, wheezing, and shortness of breath, as well as an irregular heartbeat, could be symptoms of acute heart failure. In some cases, it is related to pre-existing cardiomyopathy. AHF often requires unexpected hospital admission. It can also be associated with a poor prognosis and a high risk of readmission and death post-discharge. Treatment options include medication, surgery, and implanted medical devices, as well as recommended lifestyle modifications.

[0218] In most cases, patients with AHF present with either preserved (90-140 mmHg) or elevated (.140 mmHg; hypertensive AHF) systolic blood pressure (SBP). Only 5 -8% of all patients present with low SBP (i.e.,90 mmHg; hypotensive AHF), which is associated with poor prognosis, particularly when hypoperfusion is also present.

### (II) Chronic Heart Failure (Also Used Interchangeably With Congestive Heart Failure)

[0219] Heart failure (HF) is a complex syndrome with many possible causes that result from impaired ability of the left ventricle to either fill with blood during the diastolic phase of the cardiac cycle or eject blood during the systolic phase of the cardiac cycle. The affected heart is consequently increasingly less able to pump a sufficient blood volume to meet the oxygen demands of the body.

[0220] Heart failure is a common chronic condition, which predominantly affects the elderly. Prevalence is 0.8-2% in the general population but 10-20% among those aged >70 years. With an ever-aging population, prevalence is increasing. In the US, HF currently affects 5.8 million; one estimate predicts that this will rise to more than 8 million by 2030.

[0221] Chronic heart failure (CHF) describes the heart’s inability to pump enough blood through the body and provide a sufficient supply of oxygen - that is, CHF is the inability of the heart to pump the required quantity of the blood to meet the demands of the body. This is caused by a weaker than a normal heart. When the body receives a poor inflow of the blood from the heart, several tissues and organs begin to function below their potential, making it impossible for an individual to possess the needed energy to indulge in regular activities. When the heart cannot fill properly or pump blood forward, it causes fluid to build up into the tissues of the body, resulting in congestion or swelling. The typical symptoms of CHF are shortness of breath and fatigue, however, some people with CHF only experience fatigue and decreased activity tolerance. Those who experience congestion may have swelling in the ankles and legs, abdomen, or lungs. Shortness of breath and pulmonary edema can lead to respiratory distress if not treated promptly. Heart failure can also affect the kidneys’ ability to process and eliminate sodium and water. This may result in even more fluid retention and subsequent swelling. In many cases, the improper heart functioning leads to death, as the heart fails to receive oxygen and blood to the heart muscle.

[0222] The heart failure can occur to the left side or the right side.

[0223] Left Side Cardiac Failure: Left side cardiac failure occurs when the failure occurs due to improper functioning of the left ventricle. In such cases, the left ventricle fails in pumping with necessary force to pump the blood from the heart, as needed by the body. Due to this, the left chamber accumulates with blood that eventually leads to pulmonary edema and pulmonary hypertension. The causes of the same include hypertension, ischemic heart diseases, aortic valve diseases, and primary myocardial diseases.

[0224] Right Side Heart Failure: The primary reason for the failure of right side ventricle is because of left side heart failure. However, if the occurrence of the failure of the right side is due to pathology in the lungs, then it is coronary pulmonale. CHF is most common in men and risk factors include age, high blood pressure, being overweight and the presence of metabolic disorders like diabetes. CHF is as its name describes - it is a long-term condition that can get worse over time. Prior to the current invention, it generally cannot be cured but it can be medically managed.

[0225] Ejection fraction: The ejection fraction describes the pumping ability of the heart; a muscle that contracts and relaxes with every beat. The EF measures the percentage of blood pumped out of the heart each time it contracts. With every beat, the heart pumps blood throughout the body. When the pumping ability of the heart is impaired, the ejection fraction measurements decline. The normal range for an EF is 55% to 70%. In some embodiments, the methods as disclosed herein are used for a subject who has a heart failure with a reduced EF (HFrEF).

### Diastolic Heart Failure:

[0226] Diastolic HF is also known as heart failure with preserved ejection fraction (HFpEF), and develops when the left ventricle becomes rigid or stiff and cannot relax during diastole, the time between beats. This prevents the heart from properly refilling with blood. Representing about half of all HF cases, diastolic heart failure is most common in older people and in women. It is often present when there are other underlying medical conditions (comorbidities) that can contribute to the development of HF. HFpEF denotes a preserved ejection fraction because although the muscle cannot relax as well as it should, the left ventricle is still pumping normally.

### Systolic Heart Failure:

[0227] Systolic HF is also known as heart failure with reduced ejection fraction (HFrEF), and develops when the left ventricle does not contract normally. This means the heart no longer pumps with enough force to squeeze enough blood into circulation. Conditions like high blood pressure, arrhythmias, coronary artery disease, and abuse of alcohol and drugs can contribute to the development of heart failure. HFrEF progresses as the left ventricle, the lower-left chamber of the heart, gets larger and works harder to squeeze pump the right amount of oxygen-rich blood out to fuel the body.

### Decompensated Heart Failure:

[0228] Decompensated heart failure (DHF) occurs when patients who have known HF develop worsening signs and symptoms of congestion. This is also called fluid overload, as the body has more fluid than it can get rid of. Patients may have weight gain, worsening dyspnea, swelling or edema in their legs or abdomen, nausea, and are short of breath while lying down. Decompensated heart failure can also cause fatigue, making you feel more tired when doing vigorous or everyday activities. This can interfere with carrying out household activities or any strenuous tasks at work. These patients may need to be admitted to the hospital for treatment.

[0229] There are a range of causes for heart failure. They broadly include non-ischemic heart failure and ischemic heart failure. Non-ischemic heart failure can be genetically based, caused by an illness (Kawasaki disease), cardiomyopathy, nutritionally based, such as alcohol induced heart failure, or virus infections (and possibly by Covid-19). It can also be caused by ischemia.

[0230] There are several diseases and conditions that can lead a subject to heart failure, including, e.g., hypertension, renal insufficiency, damaged heart tissue (myocardial infarction, including antecedent myocardial infarction (MI), coronary artery disease/ischemia, abnormal heart valves or chambers (congenital or acquired), Pulmonary embolus (PE) and hypertension, heart arrhythmias, cardiomyopathy, diabetes mellitus, age-related deterioration, substance abuse, toxins, Obstructive sleep apnea, and Infections (myocarditis, endocarditis).

[0231] Heart imaging (echocardiography) allows measurement of the left ventricular ejection fraction (LVEF). This is the% of the total blood volume in the left ventricle that is ejected during systole and is normally around 50-70%. HF due to impaired ventricular ejection is associated with reduced ejection fraction (rEF), i.e. less than 50% and is referred to as HFrEF or systolic heart failure. HF due to impaired ventricle filling is associated with preserved EF (i.e. >55%) and is referred to as HFpEF or diastolic heart failure. Heart imaging allows detection of left ventricular dysfunction (either systolic or diastolic) before symptoms of heart failure occur. In some embodiments, the patients administered with rAAV as disclosed herein, have 40% LVEF, or 35% LVEF, or 30% LVEF, or 25% LVEF, or 20% LVEF, or 15% LVEF, or 10% LVEF or, 5% LVEF or less LVEF. In some embodiments, the LVEF is measured by Transthoracic echocardiography (TTE).

[0232] Previous myocardial infarction (MI) and chronic hypertension (CH) are the two most common causes of HF. Diabetes is associated with increased risk of HF, independent of previous MI or chronic hypertension.

[0233] Cardinal symptoms of HF include: breathlessness after only mild exertion (dyspnea); exercise intolerance, fatigue; and eventually ankle swelling/pain due to local fluid (edema) accumulation. HF is a progressively debilitating condition. The New York Heart Association (NYHA) Functional Classification is widely used to classify the severity of HF to one of four classes based on the extent to which physical activity is limited. NYHA Class I is essentially asymptomatic HF, and NYHA Class IV is applied to patients with most severe HF who are “unable to carry on any physical activity without discomfort”. These Class IV HF patients “experience symptoms (breathlessness, fatigue, etc.) at rest.” In some embodiments, the patients administered with rAAV as disclosed herein, have either NYHA class III or, NYHA class IV heart failure.

[0234] Typically, patients have periods of chronic stable HF, punctuated by acute exacerbation, called acute (decompensated) heart failure (AHF) when symptoms and hemodynamic condition worsen significantly, requiring emergency admission to hospital. AHF, which may occur in those who have not yet been diagnosed with HF, is associated with high mortality. Around 12-15% of patients hospitalized for AHF die within 12 weeks and 30% die within 12 month of admission.

[0235] In some embodiments, the rAAV vectors and methods of administration as disclosed herein is used in a method to treat chronic non-ischemic cardiomyopathy or ischemic cardiomyopathy. In some embodiments, the subject has chronic non-ischemic cardiomyopathy. In some embodiments, subject with chronic ischemic cardiomyopathy are not amenable to treatment. In some embodiments, the subject amenable to treatment if a rAAV vector disclosed herein, administered according to the methods as disclosed herein has LVEF (left ventricle end-diastolic volume) ≤ 30% by transthoracic echocardiography (TTE) within 6 months prior to enrolment. In some embodiments, the subject has an LVEF as follows >120 ventricular volume/EDVI (ml) (severe LV enlargement), or between 100-120 ventricular volume/EDVI (ml) (moderate LV enlargement), or between 84-99 ventricular volume/EDVI (ml) (mild LV enlargement). In some embodiments, if a subject has a ventricular volume/EDVI (ml) of equal or less than 84 (normal LV) the subject is not amenable to treatment with a rAAV vector as disclosed herein as administered according to the disclosed methods.

### (III) Cardiomyopathies

[0236] Cardiomyopathy and Congestive Heart Failure (CHF) are extremely common conditions that are responsible for millions of death around the globe. Cardiomyopathy belongs to the heterogeneous group of diseases that cause either mechanical or electrical dysfunction that exhibits inappropriate dilatation. The occurrence is due to several factors, including genetic factors. They are part of multi-system disorder or confined to the heart alone that leads to cardiovascular death. Congestive heart failure, is the inability of the heart to pump the required quantity of the blood to meet the demands of the body. Cardiomyopathy and heart failure or, congestive heart failure are closely integrated with each other; cardiomyopathy is the pathology of heart muscle wheras heart failure is the syndrome that happens when there is cardiomyopathy.

[0237] There are Three Types of Cardiomyopathy: (1) Dilated Cardiomyopathy which occurs due to progressive cardiac dilatation with concomitant hypertrophy. Causes include genetic mutations, childbirth, iron overload, myocarditis, and alcohol abuse. (2) Hypertrophic Cardiomyopathy, which occurs due to genes, myocardial hypertrophy, and improper functioning of the left ventricular myocardium. They lead to abnormal diastolic filling and obstruct the intermittent ventricular outflow. (3) Restrictive Cardiomyopathy which is least common and appears due to decrease in ventricular compliance, which results in an impaired ventricular filling. The causes include radiation fibrosis, amyloidosis, metastatic tumors, and sarcoidosis.

[0238] In all aspects disclosed herein, the methods encompass treating a subject with heart failure. In some embodiments, the subject has non-ischemic cardiomyopathy. In other embodiments, the subject has ischemic cardiomyopathy.

[0239] The term “cardiomyopathy” refers to “cardio” (heart), “myo” (muscle), “pathy” (disease of). A dilated cardiomyopathy results in left ventricular chamber enlargement, systolic dysfunction and clinical manifestations of congestive heart failure.

[0240] In some embodiments, the subject with a non-ischemic cardiomyopathy has a dilated cardiomyopathy, where there is dilation and impaired contraction of one or both ventricles.

[0241] In some embodiments, a subject has non-ischemic cardiomyopathy due to toxins, e.g., alcohol, drugs (e.g., anthracyclines). In some embodiments, a subject has non-ischemic cardiomyopathy due to an infiltrative agent, e.g., sarcoid, iron overload (haemochromatosis or excess blood transfusions). In some embodiments, a subject has non-ischemic cardiomyopathy due to dietary issues, e.g., beri-beri (thiamine deficiency.

[0242] In some embodiments, a subject has non-ischemic cardiomyopathy due to a current or prior infection, such as, but not limited to, viral infection, e.g., Chagas’ disease, HI, coxsackie or Lyme disease, coronaviruses (MERS-CoV (causes MERS), SARS-CoV (causes SARS), SARS-CoV2 (causes COVID-19), and human coronaviruses 229E, NL63, OC43 and HKU1. In some embodiments, a subject with non-ischemic cardiomyopathy has long-Covid or a long term complication or symptom due to a covid infection.

[0243] In some embodiments, a subject has non-ischemic cardiomyopathy due to a hereditary condition, e.g., familial DCM, muscular dystrophies (Duchenne, myotonia, mitochondrial). In some embodiments of the methods to treat a subject heart failure as disclosed herein, subject has non-ischemic cardiomyopathy due a genetic disorder with a cardiac manifestation, selected from the group comprising: 22q11.2 deletion syndrome, Abdominal aortic aneurysm, Aberrant subclavian artery, Adult polyglucosan body disease, Alpha-mannosidosis, Alström syndrome, Andersen-Tawil syndrome, Aneurysm of sinus of Valsalva, Arrhythmogenic right ventricular cardiomyopathy, Arterial tortuosity syndrome, Ehlers-Danlos syndrome, Atrial myxoma, familial, Atrial septal defect ostium primum, Atrial septal defect sinus venosus, Baroreflex failure, Barth syndrome, Becker muscular dystrophy, Bidirectional tachycardia, Blue rubber bleb nevus syndrome, Brachydactyly long thumb type, Broken heart syndrome, Brugada syndrome, Brugada syndrome 3, Brugada syndrome 4, Budd-Chiari syndrome, Buerger disease, Cardiac hydatid cysts with intracavitary expansion, Cardiac rupture, Cardiac-Valvular Ehlers-Danlos syndrome, Cardioencephalomyopathy, Cardiofaciocutaneous syndrome, Cardiomyopathy cataract hip spine disease, Cardiomyopathy dilated with woolly hair and keratoderma, Carney complex, Carnitine-acylcarnitine translocase deficiency, Catecholaminergic polymorphic ventricular tachycardia, Chaotic atrial tachycardia, CHARGE syndrome, Chromosome 1p36 deletion syndrome, COG1-CDG (CDG-IIg), COG7-CDG (CDG-IIe), Combined oxidative phosphorylation deficiency 16, Congenital generalized lipodystrophy type 4, Congenital heart block, Congenitally corrected transposition of the great arteries, Cor triatriatum dexter, Cor triatriatum sinister, Costello syndrome, Cystic medial necrosis of aorta, Danon disease, DCMA syndrome, Diffuse cutaneous systemic sclerosis, Dilated cardiomyopathy, Dilated cardiomyopathy with hypergonadotropic hypogonadism,DOLK-CDG (CDG-Im), DPM3-CDG (CDG-Io), Duchenne muscular dystrophy (DMD), Ebstein’s anomaly, Ellis Yale Winter syndrome, Ellis-Van Creveld syndrome, Eosinophilic granulomatosis with polyangiitis, Fabry disease, Familial atrial fibrillation, Familial dilated cardiomyopathy, Familial hypertrophic cardiomyopathy, Familial progressive cardiac conduction defect, Familial thoracic aortic aneurysm and aortic dissection, Fibrocartilaginous embolism, Fibromuscular dysplasia, Friedreich ataxia, Fucosidosis, Gaucher disease, Gaucher disease type 1, Glutaric acidemia type II, Glycogen storage disease type 2, Glycogen storage disease type 3, Glycogen storage disease type 4, Heart-hand syndrome, Slovenian type, Heart-hand syndrome, Spanish type, HEC syndrome, His bundle tachycardia, Holt-Oram syndrome, Human HOXA1 Syndromes, Hurler syndrome, Hurler-Scheie syndrome, Hypereosinophilic syndrome, Hypoplastic left heart syndrome, Infantile histiocytoid cardiomyopathy, Intracranial arteriovenous malformation, Isobutyryl-CoA dehydrogenase deficiency, Ivemark syndrome, Jervell Lange-Nielsen syndrome, Kallikrein hypertension, Kawasaki disease, Kearns-Sayre syndrome, LCHAD deficiency, Leber hereditary optic neuropathy, Left ventricular noncompaction, LEOPARD syndrome, Limb-girdle muscular dystrophy type 1B, Limb-girdle muscular dystrophy type 2E, Limb-girdle muscular dystrophy type 2F, Limb-girdle muscular dystrophy type 2M - See Limb-girdle muscular dystrophy, Limb-girdle muscular dystrophy, type 2C, Limb-girdle muscular dystrophy, type 2D, Limited cutaneous systemic sclerosis, Limited systemic sclerosis, Loeys-Dietz syndrome type 2, Loeys-Dietz syndrome type 4, Long QT syndrome 1, Lymphedema and cerebral arteriovenous anomaly, Lymphocytic vasculitis, Mannosidosis, beta A, lysosomal, McLeod neuroacanthocytosis syndrome, Medulloblastoma, MGAT2-CDG (CDG-IIa), Microcephaly-cardiomyopathy; Mitochondrial encephalomyopathy lactic acidosis and stroke-like episodes, Mitochondrial trifunctional protein deficiency, Mitral atresia, Mitral valve prolapse, familial, autosomal dominant, Musculocontractural Ehlers-Danlos syndrome, Myoclonic epilepsy with ragged red fibers, Myotonic dystrophy type 1, Nathalie syndrome, Naxos disease, Neonatal stroke, Neurofibromatosis-Noonan syndrome, Noonan syndrome, Noonan syndromes 1 -, 2-, 3-, 4-, 5- and 6, Noonan-like syndrome with loose anagen hair, Ostium secundum atrial septal defect, Paroxysmal ventricular fibrillation, Patent ductus arteriosus, Patent ductus venosus, Peripartum cardiomyopathy, Peters plus syndrome, PGM1-CDG, PHACE syndrome, Phospholamban Arg 14 Deletion, Postural orthostatic tachycardia syndrome, Primary carnitine deficiency, Progressive familial heart block type 1A, Progressive familial heart block type 1B, Progressive familial heart block type 2, Pseudohypoaldosteronism type 2, Pseudoxanthoma elasticum, Pulmonary arterial hypertension, Pulmonary atresia with intact ventricular septum, Pulmonary atresia with ventricular septal defect, Pulmonary valve stenosis, Pulmonary vein stenosis, Pulmonic stenosis, Renoprival hypertension, Retinal arterial macroaneurysm with supravalvular pulmonic stenosis, Right ventricle hypoplasia, Sarcoidosis,Sengers syndrome, Situs inversus, Sudden Arrhythmia Death Syndrome, Supravalvular aortic stenosis, Swyer syndrome, TANGO2-Related Metabolic Encephalopathy and Arrhythmias, TARP syndrome, Tetralogy of Fallot, Timothy syndrome, Tricuspid atresia, Vici syndrome, VLCAD deficiency, White forelock with malformations, and Williams syndrome.

### (Iv) Cardiovascular Condition and Cardiovascular Diseases in General:

[0244] In some embodiments, the rAAV vectors and methods of administration as disclosed herein are also provided for use in peripheral vascular diseases such as peripheral arterial occlusive disease (PAOD). As described and illustrated herein, these methods are thus useful for treating a cardiovascular condition, heart disease, peripheral vascular disease and similar disorders.

[0245] In some embodiments, the rAAV vectors and methods of administration as disclosed herein are useful in methods to treat dilated cardiomyopathy (DCM), a type of heart failure that is typically diagnosed by the finding of a dilated, hypocontractile left and/or right ventricle. DCM can occur in the absence of other characteristic forms of cardiac disease such as coronary occlusion or a history of myocardial infarction. DCM is associated with poor ventricular function and symptoms of heart failure. In these patients, chamber dilation and wall thinning generally results in a high left ventricular wall tension. Many patients exhibit symptoms even under mild exertion or at rest, and are thus characterized as exhibiting severe, i.e. “Type-III” or “Type-IV”, heart failure, respectively (see, e.g., NYHA classification of heart failure). As noted above, many patients with coronary artery disease may progress to exhibiting dilated cardiomyopathy, often as a result of one or more heart attacks (myocardial infarctions).

[0246] In some embodiments, the rAAV vectors and methods of administration as disclosed herein are useful in a method to prevent, inhibit, slow the progression, or at least lessen deleterious left ventricular remodeling (a.k.a., deleterious remodeling, for short), which refers to chamber dilation after myocardial infarction that can progress to severe heart failure. Even if ventricular remodeling has already initiated, it is still desirable to promote an increase in blood flow, as this can still be effective to offset ventricular dysfunction. Similarly, promotion of angiogenesis can be useful, since the development of a microvascular bed can also be effective to offset ventricular dysfunction. Further, such rAAV vectors and methods of administration as disclosed herein can also have other enhancing effects. In a patient who has suffered a myocardial infarction, deleterious ventricular remodeling is prevented if the patient lacks chamber dilation and if symptoms of heart failure do not develop. Deleterious ventricular remodeling is alleviated if there is any observable or measurable reduction in an existing symptom of the heart failure. For example, the patient may show less breathlessness and improved exercise tolerance. Methods of assessing improvement in heart function and reduction of symptoms are essentially analogous to those described above for DCM. Prevention or alleviation of deleterious ventricular remodeling as a result of improved collateral blood flow and ventricular function and/or other mechanisms is expected to be achieved within weeks after in vivo angiogenic gene transfer in the patient using methods as described herein.

[0247] In another example, the rAAV vectors and methods of administration as disclosed herein transfer of a transgene encoding an inhibitor of PP1, an angiogenic protein or a therapeutic protein selected from Table 18A-18B, is used to treat conditions associated with congestive heart failure (CHF).

[0248] In one embodiment, the disease may be cardiovascular condition or heart disease and disorders. In one embodiment, the disease may be heart failure such as congestive heart failure. In one embodiment, the subject may have non-ischemic cardiomyopathy.

[0249] In some embodiments, the disease may be selected from congestive heart failure, coronary artery disease, atherosclerosis, cardiomyopathy, idiopathic cardiomyopathy, cardiac arrhythmias, muscular dystrophy, muscle mass abnormality, muscle degeneration, infective myocarditis, drug- or toxin-induced muscle abnormalities, hypersensitivity myocarditis, an autoimmune endocarditis and congenital heart disease.

[0250] In one embodiment, the disease may be selected from arrhythmia, abnormal heart contractility, non-ischemic cardiomyopathy, peripheral arterial occlusive disease, and abnormal Ca2+ metabolism, and combinations thereof. In some embodiments, the disease may be selected from the group of: congestive heart failure, cardiomyopathy, vascular disease, acquired heart disease, congenital heart disease, atherosclerosis, dysfunctional conduction systems, dysfunctional coronary arteries, pulmonary heart hypertension.

[0251] In some embodiments, the muscular disease is a vascular disease. Vascular disease may be coronary artery disease, peripheral arterial disease, cerebrovascular disease, renal artery stenosis or aortic aneurysm. In some embodiments, the muscular disease may be cardiomyopathy. The cardiomyopathy may be hypertensive heart disease, heart failure (such as congestive heart failure), pulmonary heart disease, cardiac dysrhythmias, inflammatory heart disease (such as endocarditis, inflammatory cardiomegaly, myocarditis), valvular heart disease, congenital heart disease and rheumatic heart disease.

[0252] In some embodiments, the cardiomyopathy is hypertrophic cardiomyopathy, arrhythmogenic right ventricular dysplasia, dilated cardiomyopathy, restrictive cardiomyopathy, left ventricular noncompaction, Takotsubo cardiomyopathy, myocarditis and eosinophilic myocarditis. Preferably, the hypertrophic cardiomyopathy is CMH1 (Gene: MYH7), CMH2 (Gene: TNNT2), CMH3 (Gene: TPM1), CMH4 (Gene: MYBPC3), CMH5, CMH6 (Gene: PRKAG2), CMH7 (Gene: TNNI3), CMH8 (Gene: MYL3), CMH9 (Gene: TTN), CMH10 (Gene: MYL2), CMH11 (Gene: ACTC1), or CMH12 (Gene: CSRP3). Preferably, the arrhythmogenic right ventricular dysplasia is ARVD1 (Gene: TGFB3), ARVD2 (Gene: RYR2), ARVD3, ARVD4, ARVD5 (Gene: TMEM43), ARVD6, ARVD7 (Gene: DES), ARVD8 (Gene: DSP), ARVD9 (Gene: PKP2), ARVD10 (Gene: DSG2), ARVD11 (Gene: DSC2), and/or ARVD12 (Gene: JUP).

[0253] In another example, the rAAV vectors and methods of administration as disclosed herein can be used for the treatment of any of: congestive heart failure, non-ischemic cardiomyopathy, vascular disease, acquired heart disease, congenital heart disease, atherosclerosis, dysfunctional conduction systems, dysfunctional coronary arteries, pulmonary heart hypertension. In some embodiments, the disease is selected from the group consisting of congestive heart failure, coronary artery disease, myocardial infarction, myocardial ischemia, atherosclerosis, cardiomyopathy, idiopathic cardiomyopathy, cardiac arrhythmias, muscular dystrophy, muscle mass abnormality, muscle degeneration, infective myocarditis, drug- or toxin-induced muscle abnormalities, hypersensitivity myocarditis, an autoimmune endocarditis and congenital heart disease.

[0254] Heart failure, also called congestive heart failure (CHF), is a disorder in which the contractility of the heart muscle decreases, and the heart loses its ability to pump blood efficiently. It is estimated to affect over 10 million Americans, alone. Heart failure is almost always a chronic, long-term condition, and consumes an inordinate amount of medical intervention and human resource dollars. In particular, the consequences of heart failure to the rest of the body organs can be devastating both in terms of the overall reduction in productive life of the patient, and the expense of treatment. The condition may affect the right side, the left side, or both sides of the heart. As the pumping action of the heart is compromised, blood begins backing up into other areas of the body. Many organs and organ systems begin to suffer cumulative damage from lack of oxygen and nutrients.

[0255] There may be many underlying causes, and heart failure becomes more common with advancing age. Problematically, some patients with heart failure have no obviously noticeable symptoms, permitting serious peripheral conditions to manifest without the benefit of early intervention to ward off or abate the rate of serious organ damage.

### (IV) Ischemic Cardiomyopathy

[0256] In some embodiments, the rAAV vectors and methods of administration as disclosed herein is used in a method for substantially reducing myocardial ischemia.

[0257] In one example, the rAAV vectors and methods of administration as disclosed herein is used in a method for substantially reducing myocardial ischemia.

[0258] In one embodiment, the disease may be selected from ischemia, myocardial infarction (MI), ischemic cardiomyopathy and combinations thereof. In some embodiments, the disease may be selected from the group of: infarction, tissue ischemia, cardiac ischemia, atherosclerosis or CAD.

[0259] Myocardial ischemia is an aspect of heart dysfunction that occurs when the heart muscle (the myocardium) does not receive adequate blood supply and is thus deprived of necessary levels of oxygen and nutrients. Myocardial ischemia may result in a variety of heart diseases including, for example, angina, heart attack and/or congestive heart failure. The most common cause of myocardial ischemia is atherosclerosis (also referred to as coronary artery disease or “CAD”), which causes blockages in the coronary arteries, blood vessels that provide blood flow to the heart muscle. Present treatments for myocardial ischemia include pharmacological therapies, coronary artery bypass surgery and percutaneous revascularization using techniques such as balloon angioplasty. Standard pharmacological therapy is predicated on strategies that involve either increasing blood supply to the heart muscle or decreasing the demand of the heart muscle for oxygen and nutrients. For example, increased blood supply to the myocardium can be achieved by agents such as calcium channel blockers or nitroglycerin. These agents are thought to increase the diameter of diseased arteries by causing relaxation of the smooth muscle in the arterial walls. Decreased demand of the heart muscle for oxygen and nutrients can be accomplished either by agents that decrease the hemodynamic load on the heart, such as arterial vasodilators, or those that decrease the contractile response of the heart to a given hemodynamic load, such as beta-adrenergic receptor antagonists. Surgical treatment of ischemic heart disease is generally based on the bypass of diseased arterial segments with strategically placed bypass grafts (usually saphenous vein or internal mammary artery grafts). Percutaneous revascularization is generally based on the use of catheters to reduce the narrowing in diseased coronary arteries. In some embodiments, the patients to be treated with rAAV as disclosed herein, are co-administered with nitroglycerin or, nitroprusside.

[0260] Many patients with heart disease, including many of those whose severe myocardial ischemia resulted in a heart attack, are diagnosed as having congestive heart failure. Congestive heart failure is defined as abnormal heart function resulting in inadequate cardiac output to meet metabolic needs (Braunwald, E. (ed), In: Heart Disease, W. B. Saunders, Philadelphia, page 426, 1988). An estimated 5 million people in the United States suffer from congestive heart failure. Once symptoms of CHF are moderately severe, the prognosis is worse than most cancers in that only half of such patients are expected to survive for more than 2 years (Braunwald, E. (ed), In: Heart Disease, W. B. Saunders, Philadelphia, page 471-485, 1988). Medical therapy can initially attenuate the symptoms of CHF (e.g., edema, exercise intolerance and breathlessness), and in some cases prolong life. However, the prognosis for this disease, even with medical treatment, remains grim, and the incidence of CHF has been increasing (see, e.g., Baughman, K., Cardiology Clinics 13: 27-34, 1995). Symptoms of CHF include breathlessness, fatigue, weakness, leg swelling and exercise intolerance. On physical examination, patients with heart failure tend to have elevations in heart and respiratory rates, rates (an indication of fluid in the lungs), edema, jugular venous distension, and, in general, enlarged hearts. The most common cause of CHF is atherosclerosis which, as discussed above, causes blockages in the coronary arteries that supply blood to the heart muscle. Thus, congestive heart failure is most commonly associated with coronary artery disease that is so severe in scope or abruptness that it results in the development of chronic or acute heart failure. In such patients, extensive and/or abrupt occlusion of one or more coronary arteries precludes adequate blood flow to the myocardium, resulting in severe ischemia and, in some cases, myocardial infarction or death of heart muscle. The consequent myocardial necrosis tends to be followed by progressive chronic heart failure or an acute low output state - both of which are associated with high mortality.

[0261] Subjects amenable to treatment by the methods as disclosed herein can be identified by any method to diagnose myocardial infarction (commonly referred to as a heart attack). Methods of diagnosing these conditions are well known by persons of ordinary skill in the art. By way of non-limiting example, myocardial infarction can be diagnosed by (i) blood tests to detect levels of creatine phosphokinase (CPK), aspartate aminotransferase (AST), lactate dehydrogenase (LDH) and other enzymes released during myocardial infarction; (ii) electrocardiogram (ECG or EKG) which is a graphic recordation of cardiac activity, either on paper or a computer monitor. An ECG can be beneficial in detecting disease and/or damage; (iii) echocardiogram (heart ultrasound) used to investigate congenital heart disease and assessing abnormalities of the heart wall, including functional abnormalities of the heart wall, valves and blood vessels; (iv) Doppler ultrasound can be used to measure blood flow across a heart valve; (v) nuclear medicine imaging (also referred to as radionuclide scanning in the art) allows visualization of the anatomy and function of an organ, and can be used to detect coronary artery disease, myocardial infarction, valve disease, heart transplant rejection, check the effectiveness of bypass surgery, or to select patients for angioplasty or coronary bypass graft.

[0262] Most patients with congestive heart failure tend to develop enlarged, poorly contracting hearts, a condition referred to as “dilated cardiomyopathy” (or DCM, as used herein). DCM is a condition of the heart typically diagnosed by the finding of a dilated, hypocontractile left and/or right ventricle. Again, in the majority of cases, the congestive heart failure associated with a dilated heart is the result of coronary artery disease, often so severe that it has caused one or more myocardial infarcts. In a significant minority of cases, however, DCM can occur in the absence of characteristics of coronary artery disease (e.g., atherosclerosis). In a number of cases in which the dilated cardiomyopathy is not associated with CAD, the cause of DCM is known or suspected. Examples include familial cardiomyopathy (such as that associated with progressive muscular dystrophy, myotonic muscular dystrophy, Freidrich’s ataxia, and hereditary dilated cardiomyopathy), infections resulting in myocardial inflammation (such as infections by various viruses, bacteria and other parasites), noninfectious inflammations (such as those due to autoimmune diseases, peripartum cardiomyopathy, hypersensitivity reactions or transplantation rejections), metabolic disturbances causing myocarditis (including nutritional, endocrinologic and electrolyte abnormalities) and exposure to toxic agents causing myocarditis (including alcohol, as well as certain chemotherapeutic drugs and catecholamines). In the majority of non-CAD DCM cases, however, the cause of disease remains unknown and the condition is thus referred to as “idiopathic dilated cardiomyopathy” (or “IDCM”). Despite the potential differences in underlying causation, most patients with severe CHF have enlarged, thin-walled hearts (i.e., DCM) and most of those patients exhibit myocardial ischemia (even though some of them may not have apparent atherosclerosis). Furthermore, patients with DCM can experience angina pectoris even though they may not have severe coronary artery disease.

[0263] Further complicating the physiological conditions associated with CHF are various natural adaptations that tend to occur in patients with dysfunctional hearts. Although these natural responses can initially improve heart function, they often result in other problems that can exacerbate the disease, confound treatment, and have adverse effects on survival. There are three such adaptive responses commonly observed in CHF patients: (i) volume retention induced by changes in sodium reabsorption, which expands plasma volume and initially improves cardiac output; (ii) cardiac enlargement (from dilation and hypertrophy) which can increase stroke volume while maintaining a relatively normal wall tension; and (iii) increased norepinephrine release from adrenergic nerve terminals impinging on the heart which, by interacting with cardiac beta-adrenergic receptors, tends to increase heart rate and force of contraction, thereby increasing cardiac output. However, each of these three natural adaptations tends ultimately to fail for various reasons. In particular, fluid retention tends to result in edema and retained fluid in the lungs that impairs breathing. Heart enlargement can lead to deleterious left ventricular remodeling with subsequent severe dilation and increased wall tension, thus exacerbating CHF. Finally, long-term exposure of the heart to norepinephrine tends to make the heart unresponsive to adrenergic stimulation and is linked with poor prognosis.

[0264] Diseases of the peripheral vasculature, like heart disease, often result from restricted blood flow to the tissue (e.g. skeletal muscle) which (like cardiac disease) becomes ischemic, particularly when metabolic needs increase (such as with exercise). Thus, atherosclerosis present in a peripheral vessel may cause ischemia in the tissue supplied by the affected vessel. This problem, known as peripheral arterial occlusive disease (PAOD), most frequently affects in the lower limbs of patients. As with other forms of cardiovascular disease, this condition or at least some of its symptoms, may be treated by using drugs, such as aspirin or other agents that reduce blood viscosity, or by surgical intervention, such as arterial grafting, surgical removal of fatty plaque deposits or by endovascular treatments, such as angioplasty. While symptoms may be improved, the effectiveness of such treatments is typically inadequate, for reasons similar to those referred to above.

### II. Methods of Administration

[0265] One aspect of the technology described herein relates to a method to administer a rAAV vector, where the method is a single administration of a total dose of a rAAV to the subject, where the single administration comprises delivery of a total dose of rAAV that is divided into at least 2, or 3, or 4, or 5 or more sub-doses within the single administration. That is - stated differently, in some embodiments, the method comprises administering a bolus of rAAV vector to the subject in a single administration, where the single administration of the bolus comprises the administration of rAAV from least 2, or 3, or 4, or 5 doses, and in some embodiments, the doses can be from 2, 3, 4, 5, or 6 or more vials or syringes, where the delivery of the rAAV from each vial or syringe takes between 1-5 minutes, or more than 5 minutes. In other aspects of the technology describe herein relates to a method to administer a rAAV vector, where the method comprises at least one administration or, more than one administration of rAAV to the subject. In some aspects of the embodiment, the method to administer rAAV vector comprises two administrations, three administrations, four administrations, or, five administrations of rAAV to the subject, where each administration comprises delivery of a total dose of rAAV that is divided into at least 2, or, 3, or, 4, or, 5 or, more sub doses.

[0266] In some embodiments, the method to administer AAV vectors is a single injection that comprises within the single injection, discrete pulses of delivery of the AAV vector. That is, in a single injection administration, the rAAV delivery is divided into a number of temporally spaced sub-administrations. For example, a single administration can be a total amount (or total dose, also referred to as “TD”) of rAAV that is divided into at least 2, or at least 3, or at least 4, or at least 5 or more sub-doses (“SD”), where each sub-dose is administered in a sub-administration, where each sub-administration is temporally spaced by a pre-defined period of time, e.g., at least 1, or at least 2, or at least 3, or at least 4, or at least 5, or at least 6, or at least 7, or at least 8, or at least 9, or at least 10 or more than 10 minutes between each sub-administration of each sub-dose. For example, a single administration of a total dose of rAAV can include a series of pulses of sub-doses, and each sub-dose is injected in a sub-administration (i.e., pulses of a single administration).

[0267] Without being limited to theory, an exemplary method of administration comprises administration of a single administration of a total dose (TD) of rAAV vector is between about 10¹³vg to about 10¹⁵vg, which can be divided into at least 2, or at least 3, or at least 4, or at least 5 or more sub-doses (SD), wherein the sub-doses are administered to the subject spaced at least 5 seconds, or at least 10 seconds, or at least 20 seconds, or at least 30 seconds, or at least 40 seconds, or at least 50 seconds or at least 1 minute, or at least 2, or at least 3, or at least 4, or at least 5, or at least 6, or at least 7, or at least 8, or at least 9, or at least 10 or more than 10 minutes apart, wherein the administration of all the sub-doses for the total rAAV dose takes between about 10 minutes to about 30 minutes, or between about 10 minutes to about 20 minutes, or between about 15 minutes to about 25 minutes, or between about 15 minutes to about 30 minutes, or, between about 25 minutes to about 30 minutes, or, between about 20 minutes to about 40 minutes, or between about 40 minutes to about 60 minutes, or more than 60 minutes, and wherein each subdose is administered over a period of time of 1 minute, or about 2 minutes, or, about 3 minutes or, about 4 minutes, or about 5 minutes, or about 6 minutes, or about 7 minutes or, about 8 minutes or about 9 minutes, or about 10 minutes or longer. In some embodiments, wherein the total rAAV dose administration is performed for about 10 minutes, or, about 15 minutes, or about 20 minutes, or about 25 minutes or about 30 minutes or about 35 minutes or, about 40 minutes or, about 45 minutes, or about 50 minutes, or about 60 minutes or longer. In certain embodiments, the total rAAV dose administration is performed for about 20 minutes to about 30 minutes. In certain aspects of the embodiments, the rAAV is selected from the group consisting of AAV2, AAV6, AAV8, AAV9, AAV2i8, rh10, AAV2.5 and AAV2G9. In some aspects of the embodiments, the rAAV administration is performed for one to five minutes in each of total five subdoses, e.g. five syringes, wherein each subdose has 8 ml, or, 9 ml, or, 10 ml, or, 12 ml, or, 15 ml, or, 20 ml, or 25 ml or more volume of diluent. In certain aspects of the embodiments, the total volume of rAAV administration is 20 ml, or 25 ml, or 30 ml, or, 35 ml, or 40 ml, or 45 ml, or 50 ml, or 60 ml, or 70 ml, or 80 ml, or 90 ml, or 100 ml or, more. Without limiting to any theory, the diluent can be saline, or different ratios of saline-blood mixture. In some aspects of the embodiments, the rAAV administered comprises a nucleic acid encoding phosphatase inhibitor protein e.g., I-1 or a variant thereof such as I-1c, and a promoter selected from CMV promoter or a synthetic promoter selected from Table 18A or 18B or a variant thereof. In all aspects of the embodiments, the rAAV comprises self-complimentary (sc) genome.

[0268] In some embodiments, where a single administration of a total dose (TD) of rAAV vector is divided into at least 2, or at least 3, or at least 4, or at least 5 or more sub-doses (SD), each sub-dose can be administered or injected into the subject over a pre-defined time period, e.g., at least 1, or at least 2, or at least 3, or at least 4, or at least 5, or at least 6, or at least 7, or at least 8, or at least 9, or at least 10 or more than 10 minutes, and wherein there is an interval of at least 1, or at least 2, or at least 3, or at least 4, or at least 5, or at least 6, or at least 7, or at least 8, or at least 9, or at least 10 or more than 10 minutes between administration of each sub-dose. In some embodiments, each sub-dose is administered over a period of 1-5 minutes. In some embodiments, the time interval between the sub-doses can be consistent, e.g., same time in-between each sub-dose, or can vary. For example, in an exemplary administration method where the total dose (TD) of a rAAV vector is divided into 5 sub-doses (sd1, sd2, sd3, sd4, sd5), the interval between administration of sd1 and sd2 can be, e.g., at least 2 minutes, and the interval between administration of sd3 after sd2 can be, e.g., 5 minutes.

[0269] In some embodiments, the sub-doses of rAAV is by a bolus or in separate vials or separate syringes.

[0270] In some embodiments, the single administration of the rAAV vector is co-administered with an additional agent, or therapeutic agent. In some embodiments, the additional agent is an immune modulator as disclosed herein. In some embodiments, the additional agent is administered before, or after, or both (before and after) the single injection of the complete rAAV dose. In some embodiments, the additional agent (e.g., immune modulator) is administered to the subject in the intervals between sub-doses of the rAAV, that is - for example, in an exemplary administration method where the total dose (TD) of a rAAV vector is divided into 5 sub-doses (sd1, sd2, sd3, sd4, sd5), the additional agent, e.g., immune modulator can be administered between any one or more of: between sd1 and sd2, between sd2 and sd3, between sd3 and sd4, between sd4 and sd5. In some embodiments, the additional agent, e.g., immune modulator is present in the sub-doses of rAAV.

[0271] In some embodiments, the total-dose of the rAAV is selected from any of: about 10¹¹ vg, about 3×10¹¹ vg, about 5×10¹¹ vg, about 10¹² vg, about 3×10¹² vg, about 5×10¹² vg, about 10¹³ vg, about 3×10¹³ vg, about 10¹⁴ vg, 3×10¹⁴ vg, or, about 10¹⁵ vg, or more than about 10¹⁵ vg. In some embodiments, total-dose of the rAAV is between about 10¹³ vg to about 10¹⁵ vg. In some embodiments, at least one, or at least two or at least three or more total doses of rAAV is administered. In some embodiments, each subdose of rAAV is between about 10¹¹ vg to about 10¹⁵ vg. In certain embodiments, each subdose of rAAV is between about 10¹³ vg to about 10¹⁵ vg. In one embodiment, each subdose of the rAAV is selected from any of about 10¹¹ vg, about 3×10¹¹ vg, about 5× 10¹¹ vg, about 10¹² vg, about 3×10¹² vg, about 5×10¹² vg, about 10¹³ vg, about 3×10¹³ vg, about 10¹⁴ vg, 3×10¹⁴ vg, or, about 10¹⁵ vg, or more than about 10¹⁵ vg.

[0272] In some embodiments, the rAAV administration is performed for one to five minutes in each of total five subdoses e.g., in each of total five syringes, wherein each subdose has 10 ml volume e.g., saline. In certain embodiments, the rAAV administration is performed for one to five minutes in each of total five syringes, wherein each syringe has 8 ml, or, 9 ml, or, 10 ml, or, 12 ml, or, 15 ml, or, 20 ml, or 25 ml or more volume of diluent. The diluent is saline or, different ratios of saline-blood mixture. In certain embodiments, the total volume of rAAV administration is 20 ml, or 25 ml, or 30 ml, or, 35 ml, or 40 ml, or 45 ml, or 50 ml, or 60 ml, or 70 ml, or 80 ml, or 90 ml, or 100 ml or, more. In some embodiments, the rAAV administration is performed with 1 syringe, or 2 syringes, or 3 syringes, or 4 syringes, or 5 syringes, or 6 syringes, or 7 syringes, or 8 syringes or more syringes. The rAAV subdose in each syringe is administered over a period of time of 1 minute, or 2 minutes, or 3 minutes, or 4 minutes, or 5 minutes, or 6 minutes, or 7 minutes, or 8 minutes, or 9 minutes, or 10 minutes or, longer. In some embodiments, the method comprises administering the rAAV vector systemically. Systemic administration may be enteral (e.g. oral, sublingual, and rectal) or parenteral (e.g. injection). Preferred routes of injection include intravenous, intramuscular, subcutaneous, intra-arterial, intra-articular, intrathecal, and intradermal injections. In one embodiment, the gene therapy vector may be delivered by injection into the cardiac tissue.

[0273] In some embodiments, administration of AAV vector or virion comprising the synthetic cardiac-specific promoter or expression cassette according to this invention is intravascular. Suitably, the AAV vector or virion comprising the synthetic cardiac-specific promoter or expression cassette according to this invention may be administered in the veins of the dorsal hand or the veins of the anterior forearm. Suitable veins in the anterior forearm are the cephalic, median or basilic veins. This is because this administration route is generally safe for the patient.

[0274] In some embodiments, the rAAV vector is directly injected into heart tissue. U.S. Ser. No. 10/914,829 describes a protocol for direct injection. Direct injection or application of a viral vector into the myocardium can restrict expression of the transferred genes to the heart (Gutzman et al, 1993, Cric. Res. 73: 1202-7; French et al., 1994, Circulation. 90:2414-24).

[0275] In some embodiments, the rAAV vector is introduced into the lumen of one or more coronary arteries. Passage of blood out of the coronary arteries can be restricted. The preparation comprising rAAV vectors can be delivered antegrade and allowed to reside in the arteries for between one to five minutes, e.g., between one to three minutes. Non-viral vehicles may be delivered by similar methods.

[0276] In some embodiments, the rAAV vector can be administered to a subject by standard methods. For example, the agent can be administered by any of a number of different routes including intravenous (systemic), intradermal, subcutaneous, oral (e.g., inhalation or ingestion), transdermal (topical), transmucosal or by catheter or, by syringes, or, by a combination of catheter and syringe. In one embodiment, the agent is administered by injection, e.g., intra-arterially, intramuscularly, or intravenously.

[0277] In some embodiments, flow of blood through coronary vessels of the heart of the subject is restricted, and the rAAV vector as disclosed herein is introduced into the lumen of a coronary artery in the subject. In yet another embodiment, the heart is pumping while coronary vein outflow is restricted. In yet another embodiment, flow of blood through the coronary vessels is completely restricted. The restricted coronary vessels may comprise, without limitation: the left anterior descending artery (LAD), the distal circumflex artery (LCX), the great coronary vein (GCV), the middle cardiac vein (MCV), or the anterior interventricular vein (AIV). In yet another embodiment, the introduction of the rAAV vector as disclosed herein occurs after ischemic preconditioning of the coronary vessels. In still another embodiment, the and the rAAV vector as disclosed herein is injected into the heart of the subject while aortic flow of blood out of the heart is restricted, thereby allowing the nucleic acid molecule to flow into the heart.

[0278] In some embodiments of a method according to the invention, the administering or the rAAV vector as disclosed herein comprises the steps of: restricting aortic flow of blood out of the heart, such that blood flow is re-directed to coronary arteries; injecting the nucleic acid molecule into the lumen of the heart, aorta, or coronary ostia to provide the nucleic acid molecule to a coronary artery; pumping the heart while the aortic flow of blood out of the heart is restricted; and reestablishing the aortic flow of blood. In yet another embodiment, the rAAV vector as disclosed herein is injected into the heart with a catheter. In still another embodiment, the rAAV vector as disclosed herein is directly injected into a muscle of the heart.

[0279] In some embodiments, a rAAV vector as disclosed herein can be injected into an affected vessel, e.g., an artery, or an organ, e.g., the heart. In one method of treatment embodiment, flow of blood through coronary vessels of a heart is restricted and a rAAV vector as disclosed herein is introduced into the lumen of a coronary artery. In a specific embodiment, the heart is permitted to pump while coronary vein outflow is restricted. In another specific embodiment, a rAAV vector as disclosed herein is injected into the heart while restricting aortic flow of blood out of the heart, thereby allowing the viral delivery system to flow in to and be delivered to the heart. In other embodiments, the flow of blood through the coronary vessels is completely restricted, and in specific such embodiments, the restricted coronary vessels comprise: the left anterior descending artery (LAD, the distal circumflex artery (LCX), the great coronary vein (GCV), the middle cardiac vein (MCV), or the anterior interventricular vein (AIV). In certain embodiments, the introduction of a rAAV vector as disclosed herein occurs after ischemic preconditioning of the coronary vessels.

[0280] In some embodiments, a rAAV vector as disclosed herein injected into the heart by a method comprising the steps of: restricting aortic flow of blood out of the heart, such that blood flow is re-directed to coronary arteries; injecting the vector into lumen of the heart, aorta or coronary ostia such that the vector flows into the coronary arteries; permitting the heart to pump while the aortic flow of blood out of the heart is restricted; and reestablishing the aortic flow of blood. In a more specific embodiment, a rAAV vector as disclosed herein is injected into the heart with a catheter, and in an even more specific embodiment, a rAAV vector as disclosed herein is directly injected into a muscle of the heart.

[0281] In some embodiments, the method of delivery comprises restricting blood flow to one or more of the great coronary vein (GCV), the middle cardiac vein (MCV), or the anterior interventricular vein (AIV). In some embodiments, the rAAV vector as disclosed herein is introduced into the lumen of the coronary artery after ischemic preconditioning of the left anterior descending artery (LAD) and/or the distal circumflex artery (LCX). In some embodiments, the rAAV vector as disclosed herein is introduced into the lumen of the coronary artery with a catheter, e.g., the distal circumflex artery (LCX), or a coronary vessel, e.g., a left anterior descending artery (LAD). In some embodiments, the coronary artery is the left anterior descending artery (LAD) or the distal circumflex artery (LCX).

[0282] In some embodiments, the AAV vector or virion disclosed herein may be administered concurrently or sequentially with one or more additional therapeutic agents or with one or more saturating agents designed to prevent clearance of the vectors by the reticular endothelial system, e.g., can be administered with one or more immune modulators as disclosed herein.

[0283] In some embodiments, where the vector is an AAV vector, the dosage of the vector may be from 1×10¹⁰ gc/kg to 1×10¹⁵ gc/kg or more, suitably from 1×10¹² gc/kg to 1×10¹⁴ gc/kg, suitably from 5×10¹² gc/kg to 5×10¹³ gc/kg. In some embodiments, the amount of the viral vector is between 1×10¹¹ and 1×10¹⁶ plaque forming units (pfu).

[0284] In general, the subject in need thereof will be a mammal, and preferably a primate, more preferably a human. Typically, the subject in need thereof will display symptoms characteristic of a cardiovascular condition, e.g., heart disease or heart failure. The method typically comprises ameliorating the symptoms displayed by the subject in need thereof, by expressing the therapeutic amount of the therapeutic product.

[0285] The present invention also provides a method of gene therapy of a subject, preferably a human, in need thereof, the method comprising: administering to the subject (suitably introducing into the heart of the subject) a synthetic cardiac-specific expression cassette, vector, virion or pharmaceutical composition of the present invention, which comprises a gene encoding an inhibitor of the PP1, or an angiogenic protein or peptide or any protein disclosed in Tables 4A-4B herein.

[0286] The method suitably comprises expressing a therapeutic amount of the inhibitor of PP1 in the heart tissue of said subject. Various conditions and diseases that can be treated are discussed herein. Genes encoding suitable therapeutic products are discussed herein and include but not limited to those disclosed in Tables 4A-4B.

[0287] Gene therapy protocols for therapeutic gene expression in target cells in vitro and in vivo, are well-known in the art and will not be discussed in detail here. Briefly, they include intravenous or intraarterial administration (e.g. intra-corotid artery, intra-hepatic artery, intra-hepatic vein), intracerebroventricular, intracranial administration, intramuscular injection, interstitial injection, instillation in airways, application to endothelium and intra-hepatic parenchyme, of plasmid DNA vectors (naked or in liposomes) or viral vectors. Various devices have been developed for enhancing the availability of DNA to the target cell. While a simple approach is to contact the target cell physically with catheters or implantable materials containing the relevant vector, more complex approaches can use jet injection devices and the like. Gene transfer into mammalian heart cells can been performed using both ex vivo and in vivo procedures. The ex vivo approach typically requires harvesting of heart cells (e.g., cardiomyocytes), in vitro transduction with suitable expression vectors, followed by reintroduction of the transduced cardiomyocytes into the heart. This approach is generally less preferred due to the difficulty and danger of harvesting and reintroducing cardiomyocytes in the heart. In vivo gene transfer has been achieved by injecting DNA or viral vectors directly into the heart, e.g. by intracranial injection, or by intravenous or intraarterial injection of viral vectors.

[0288] In one embodiment, the gene therapy vector may be administered to a subject (e.g., to the heart of a subject) in a therapeutically effective amount to reduce the symptoms of heart failure or a heart disorder of a subject (e.g., determined using a known evaluation method).

### Repeat Administration

[0289] In some aspects of the present invention, the use of cardiac specific synthetic promoters or, skeletal muscle specific synthetic promoters active in cardiac cells as listed in Tables 2A, 5A, or 13A provide activity in cardiac cells along with liver detargeting effect.

[0290] In some embodiments, the invention provides a method for repeat dosing comprising two administrations, wherein, the repeat dosing comprises one administration of a liver detargeting AAV virion with activity in cardiac cells, and other administration of any other AAV virion that is not used in prior administration, wherein, in one administration, the AAV virion comprises a nucleic acid encoding phosphatase inhibitor (I-1), wherein the nucleic acid operatively linked to a promoter selected from the group of CMV, CK7, myosin, CBA, CK8.intron, JET promoter, or the like, wherein, in the other administration, the AAV virion comprises a nucleic acid encoding phosphatase inhibitor, wherein the nucleic acid operatively linked to a cardiac specific promoter selected from the Table 2A or, variant thereof, or a muscle-specific promoter active in cardiac and skeletal muscle selected from Table 5A or a variant thereof, or a shortened muscle-specific promoter active in cardiac and skeletal muscle selected from Table 13A or a variant thereof, and wherein, in one administration, the AAV virion comprises an AAV capsid that is different than prior administration. In some embodiments, the I-1 comprises amino acids 1-65 of SEQ ID NO: 1 or a functional fragment thereof, wherein the threonine at position 35 of SEQ ID NO: 1 is replaced with an aspartate acid (T35D). In some embodiments, the nucleic acid encoding phosphatase inhibitor encodes a constitutively active fragment of l-1 (I-1c) comprising a fragment of SEQ ID NO: 1, wherein the fragment is selected from: amino acids 1-54 of SEQ ID NO: 1, 1-61 of SEQ ID NO: 1, 1-65 of SEQ ID NO: 1, 1 -66 of SEQ ID NO: 1, l-67 of SEQ ID NO: 1 or 1 -77 of SEQ ID NO: 1, or a functional variant thereof, wherein the threonine at position 35 of SEQ ID NO: 1 is replaced with an aspartate acid (T35D). In some embodiments, the nucleic acid sequence encoding a polypeptide comprises at least amino acids 1-54 of SEQ ID NO: 1, wherein threonine at amino acid 35 of SEQ ID NO: 1 is replaced with an aspartic acid.

[0291] Without being construed to any limitation, an example of a method of repeat dosing (administration) comprises a first and a second administration, wherein in the first administration,, AAV2i8 (or, BNP 116) vector comprising nucleic acid encoding phosphatase inhibitor (I-1) polypeptide as described herein is used to administer subjects having congestive heart failure, and wherein the nucleic acid is operatively linked with CMV promoter; in the second administration, recombinant AAV2/9 vector comprising nucleic acid encoding phosphatase inhibitor polypeptide (I-1) as described herein is used to administer said subjects, and wherein the nucleic acid is operatively linked with synthetic promoters selected from the group of SP0173, SP0320, SP0279, SP0134, SP0057, SP0229, SP0067, SP0310, SP0311, SP0267, or a variant thereof.

[0292] In some embodiments, rAAV vector comprising cardiac specific promoter selected from the Table 2A or, variant thereof, or a muscle-specific promoter active in cardiac and skeletal muscle selected from Table 5A or a variant thereof or a shortened muscle-specific promoter active in cardiac and skeletal muscle selected from Table 13A, or a variant thereof allow efficacious repeat administration of rAAV vector to treat heart disease (e.g., congestive heart failure) using a rAAV virion with any AAV capsid that is different than the prior administrations, and wherein the rAAV comprises a nucleic acid encoding phosphatase inhibitor (I-1) that is operatively linked to said promoter. In some embodiments, the rAAV comprising cardiac specific promoter selected from the Table 2A or, variant thereof, or a muscle-specific promoter active in cardiac and skeletal muscle selected from Table 5A or a variant thereof, or a shortened muscle-specific promoter active in cardiac and skeletal muscle selected from Table 13A, or a variant thereof allow efficacious repeat administration of rAAV vector to treat heart disease (e.g., congestive heart failure) using a rAAV virion with any AAV capsid that is different than the prior administrations, wherein the rAAV comprises a nucleic acid encoding phosphatase inhibitor (I-1) that is operatively linked to said promoter, and wherein the rAAV is from about 1×10¹¹ vg/ml to about 1×10¹³ vg/ml. In some embodiments, the rAAV comprising cardiac specific promoter selected from the Table 2A or, variant thereof, or a muscle-specific promoter active in cardiac and skeletal muscle selected from Table 5A or a variant thereof, or a shortened muscle-specific promoter active in cardiac and skeletal muscle selected from Table 13A, or a variant thereof allow efficacious repeat administration of rAAV vector to treat heart disease (e.g., congestive heart failure) using a rAAV virion with any AAV capsid that is different than the prior administrations, wherein the rAAV comprises a nucleic acid encoding phosphatase inhibitor (I-1) that is operatively linked to said promoter, and wherein at least one total dose of rAAV is from about 10¹¹ vg to about 10¹⁵ vg. In some embodiments, at least one total dose of rAAV is from about 10¹¹ vg to about 10¹⁴ vg. In some embodiments, at least one total dose of rAAV is 10¹² vg, or, 10¹³ vg, or, 3×10¹³ vg, or, 10¹⁴ vg, or, 3×10¹⁴ vg. For example, SP0173, SP0320, SP0279, SP0134, SP0057, SP0229, SP0067, SP0310, SP0311, or, SP0267, allow efficacious repeat administration of rAAV vector to treat heart disease (e.g., congestive heart failure) using a rAAV virion with any AAV capsid that is different than prior administration, i.e. an AAV capsid with a different immune profile.

### (I) Immune Modulators:

[0293] In some embodiments, the methods and compositions for treating heart failure, as described herein, further comprises administering an immune modulator. In some embodiments, the immune modulator can be administered at the time of rAAV vector administration, before rAAV vector administration or, after the rAAV vector administration.

[0294] In some embodiments, the immune modulator is an immunoglobulin degrading enzyme such as IdeS, IdeZ, IdeS/Z, Endo S, or, their functional variant. Non-limiting examples of references of such immunoglobulin degrading enzymes and their uses as described in US 7,666,582, US 8,133,483, US 20180037962, US 20180023070, US 20170209550, US 8,889,128, WO 2010057626, US 9,707,279, US 8,323,908, US 20190345533, US 20190262434, and, WO 2020016318, each of which are incorporated in their entirety by reference.

[0295] In some embodiments, the immune modulator is Proteasome inhibitor. In certain aspects, the proteasome inhibitor is Bortezomib. In some aspects of the embodiment, the immune modulator comprises bortezomib and anti CD20 antibody, Rituximab. In other aspects of the embodiment, the immune modulator comprises bortezomib, Rituximab, methotrexate, and intravenous gamma globulin. Non-limiting examples of such references, disclosing proteasome inhibitors and their combination with Rituximab, methotrexate and intravenous gamma globulin, as described in US 10,028,993, US 9,592,247, and, US 8,809,282, each of which are incorporated in their entirety by reference.

[0296] In alternative embodiments, the immune modulator is an inhibitor of the NF-kB pathway. In certain aspects of the embodiment, the immune modulator is Rapamycin or, a functional variant. Non-limiting examples of references disclosing rapamycin and its use described in US 10,071,114, US 20160067228, US 20160074531, US 20160074532, US 20190076458, US 10,046,064, are incorporated in their entirety. In other aspects of the embodiment, the immune modulator is synthetic nanocarriers comprising an immunosuppressant. Non limiting examples of references of immunosuppresants, immunosuppressants coupled to synthetic nanocarriers, synthetic nanocarriers comprising rapamycin, and/or, toloregenic synthetic nanocarriers, their doses, administration and use as described in US20150320728, US 20180193482, US 20190142974, US 20150328333, US20160243253, US 10,039,822, US 20190076522, US 20160022650, US 10,441,651, US 10,420,835, US 20150320870, US 2014035636, US 10,434,088, US 10,335,395, US 20200069659, US 10,357,483, US 20140335186, US 10,668,053, US 10,357,482, US 20160128986, US 20160128987, US 20200038462, US 20200038463, each of which are incorporated in their entirety by reference.

[0297] In some embodiments, the immune modulator is synthetic nanocarriers comprising rapamycin (ImmTOR™ nanoparticles) (Kishimoto, et al., 2016, Nat Nanotechnol, 11(10): 890-899; Maldonado, et al., 2015, PNAS, 112(2): E156-165), as disclosed in US20200038463, U.S. Pat. 9,006,254 each of which is incorporated herein in its entirety. In some embodiments, the immune modulator is an engineered cell, e.g., an immune cell that has been modified using SQZ technology as disclosed in WO2017192786, which is incorporated herein in its entirety by reference.

[0298] In some embodiments, the immune modulator is selected from the group consisting of poly-ICLC, 1018 ISS, aluminum salts, Amplivax, AS15, BCG, CP-870,893, CpG7909, CyaA, dSLIM, GM-CSF, IC30, IC31, Imiquimod, ImuFact IMP321, IS Patch, ISS, ISCOMATRIX, JuvImmune, LipoVac, MF59, monophosphoryl lipid A, Montanide IMS 1312, Montanide ISA 206, Montanide ISA 50V, Montanide ISA-51, OK-432, OM-174, OM-197-MP-EC, ONTAK, PEPTEL, vector system, PLGA microparticles, resiquimod, SRL172, Virosomes and other Virus-like particles, YF-17D, VEGF trap, R848, beta-glucan, Pam3Cys, and Aquila’s QS21 stimulon. In another further embodiment, the immunomodulator or adjuvant is poly-ICLC

[0299] In some embodiments, the immune modulator is a small molecule that inhibit the innate immune response in cells, such as chloroquine (a TLR signaling inhibitor) and 2-aminopurine (a PKR inhibitor), can also be administered in combination with the composition comprising at least one rAAV as disclosed herein. Some non-limiting examples of commercially available TLR-signaling inhibitors include BX795, chloroquine, CLI-095, OxPAPC, polymyxin B, and rapamycin (all available for purchase from INVIVOGEN™). In addition, inhibitors of pattern recognition receptors (PRR) (which are involved in innate immunity signaling) such as 2-aminopurine, BX795, chloroquine, and H-89, can also be used in the compositions and methods comprising at least one rAAV vector as disclosed herein for in vivo protein expression as disclosed herein.

[0300] In some embodiments, a rAAV vector can also encode a negative regulators of innate immunity such as NLRX1. Accordingly, in some embodiments, a rAAV vector can also optionally encode one or more, or any combination of NLRX1, NS1, NS¾A, or A46R. Additionally, in some embodiments, a composition comprising at least one rAAV vector as disclosed herein can also comprise a synthetic, modified-RNA encoding inhibitors of the innate immune system to avoid the innate immune response generated by the tissue or the subject.

[0301] In some embodiments, an immune modulator for use in the administration methods as disclosed herein is an immunosuppressive agent. As used herein, the term “immunosuppressive drug or agent” is intended to include pharmaceutical agents which inhibit or interfere with normal immune function. Examples of immunosuppressive agents suitable with the methods disclosed herein include agents that inhibit T-cell/B- cell costimulation pathways, such as agents that interfere with the coupling of T-cells and B-cells via the CTLA4 and B7 pathways, as disclosed in U.S. Pat. Pub. No 2002/0182211. In one embodiment, an immunosuppressive agent is cyclosporine A. Other examples include myophenylate mofetil, rapamicin, and anti- thymocyte globulin. In one embodiment, the immunosuppressive drug is administered in a composition comprising at least one rAAV vector as disclosed herein, or can be administered in a separate composition but simultaneously with, or before or after administration of a composition comprising at least one rAAV vector according to the methods of administration as disclosed herein. An immunosuppressive drug is administered in a formulation which is compatible with the route of administration and is administered to a subject at a dosage sufficient to achieve the desired therapeutic effect. In some embodiments, the immunosuppressive drug is administered transiently for a sufficient time to induce tolerance to the rAAV vector as disclosed herein.

[0302] In any embodiment of the methods and compositions as disclosed herein, a subject being administered a rAAV vector or rAAV genome as disclosed herein is also administered an immunosuppressive agent. Various methods are known to result in the immunosuppression of an immune response of a patient being administered AAV. Methods known in the art include administering to the patient an immunosuppressive agent, such as a proteasome inhibitor. One such proteasome inhibitor known in the art, for instance as disclosed in U.S. Pat. No. 9,169,492 and U.S. Pat. Application No. 15/796,137, both of which are incorporated herein by reference, is bortezomib. In some embodiments, an immunosuppressive agent can be an antibody, including polyclonal, monoclonal, scfv or other antibody derived molecule that is capable of suppressing the immune response, for instance, through the elimination or suppression of antibody producing cells. In a further embodiment, the immunosuppressive element can be a short hairpin RNA (shRNA). In such an embodiment, the coding region of the shRNA is included in the rAAV cassette and is generally located downstream, 3′ of the poly-A tail. The shRNA can be targeted to reduce or eliminate expression of immunostimulatory agents, such as cytokines, growth factors (including transforming growth factors β1 and β2, TNF and others that are publicly known).

[0303] The use of such immune modulating agents facilitates the ability to for one to use multiple dosing (e.g., multiple administration) over numerous months and/or years. This permits using multiple agents as discussed below, e.g., a rAAV vector encoding multiple genes, or multiple administrations to the subject.

### (II) Vasodilators

[0304] In some embodiments, the methods and compositions for treating heart failure, as described herein, further comprises administering a vasodilator. In some embodiments, the vasodilator can be administered at the time of rAAV vector administration (i.e., concurrent with, or substantially concurrent with the rAAV administration), before rAAV vector administration or, after the rAAV vector administration. Vasodilators can assist delivery of the rAAV vector by enlarging (dilating) blood vessels. In some embodiments, the vasodilator is administered at least about 1 minute prior, at least about 5 minutes prior, at least about 10 minutes prior, at least about 15 minutes prior, at least about 20 minutes prior, at least about 25 minutes prior, at least about 30 minutes prior, at least about 35 minutes prior, at least about 40 minutes prior, or more than 40 minutes prior the rAAV vector administration.

[0305] In some embodiments, the rAAV vector can be administered with at least one vasodilator selected from any of: Isosorbide dinitrate (ISORDIL®), Nesiritide (NATRECOR®), Hydralazine (APRESOLINE®), Nitrate drugs, Minoxidil, 4CAPTOPRIL™, Nitrovasodilators (nitroglycerin, isosorbide mononitrate, isosorbide dinitrate, and sodium nitroprusside, serelaxin, Endothelin antagonists (e.g., endothelin-1 (ET-1) antagonists e.g, tezosentan); other natriuretic peptides (e.g., Ularitide, CD-NP), Relaxin, Cenderitide, Clevidipine, TRV120027, Cinaciguat, BAY 1021189, BAY 28-2667 (N) and heme-independent soluble G protein activator), 1021189 CXL-1020, adenosine blockers, inhaled pulmonary vasodilators (iPVD) (e.g., iNO or inhaled epoprostenol); vasodilating inotropes (milrinone, dobutamine), [Pyr1]apelin-13 (see, e.g, El Mathari, B et al. “Apelin improves cardiac function mainly through peripheral vasodilation in a mouse model of dilated cardiomyopathy.” Peptides 142 (2021): 170568.) Vasodilators are well known to the skilled artisan and are encompassed for use in the methods and compositions as disclosed herein. Some vasodilators useful in the methods as disclosed herein are disclosed in: Holt et al., Vasodilator Therapies in the Treatment of Acute Heart Failure. Curr Heart Fail Rep. 2019 Feb;16(1):32-37, Travessa AM, Menezes Falcão L. Vasodilators in acute heart failure - evidence based on new studies. Eur J Intern Med. 2018 May; 51:1-10, et al., Levy et al., “Vasodilators in acute heart failure: review of the latest studies.” Current emergency and hospital medicine reports 2.2 (2014): 126-132; Levy, et al., 2014; Vasodilators in acute heart failure: review of the latest studies. Current emergency and hospital medicine reports, 2(2), 126-132; Kumaret al., “New drugs you are going to read about: serelaxin, ularitide, TRV027.” Current emergency and hospital medicine reports 3.2 (2015): 66-73.; Ibrahim N.E., et al., (2021) Diagnosis and Management of Acute Heart Failure. In: Gaggin H.K., Januzzi Jr. J.L. (eds) MGH Cardiology Board Review. Springer, Cham., each of which are incorporated herein in their entirety by reference.

[0306] In some embodiments, rAAVs can be administered with vasoactive agents or, vasculature permeability agents along with vasodilators. In some embodiments, rAAVs can be administered with only vasoactive agents or, vasculature permeability agents. In some embodiments, vasoactive agents and vasodilators are co administered at different times. Exemplary vasoactive agents or, vasculature permeability agents can be without limitation, histamine, histamine agonist, vascular endothelial growth factor protein (VEGF protein), serotonin, bradykinin, platelet activating factor (PAF), prostaglandin E1 (PGE1), zona occludens toxin (ZOT), interleukin 2, bradykinin, other plasmakinins as described in International Publication no. WO1999040945A3; U.S. Pat. no. 6,855,701 all of which are incorporated herein by reference in their entirety.

### III. Exemplary rAAV for Administration and rAAV Genome Elements

### A. Agent That Modulates Protein Phosphate Activity.

[0307] Increases in protein phosphorylation and enhanced cardiac function are reversed by protein phosphatases in an efficient and highly regulated process. Two main classes of serine/threonine phosphatases, referred to as phosphatase types 1 and 2 regulate cardiac muscle contractile performance (Neumann, J. et al., 1997 J Mol Cell Cardiol; 29(1): 265-72). Protein phosphatase 1 (“PP1”) accounts for a significant amount of the cardiac enzymatic activity, and has been implicated as the key class of regulatory phosphatase enzymes. PP1 is largely associated with the membrane fraction as well as glycogen particles and is important in glycogenolysis and glycogen synthesis. It is anchored to these locales by large, non-catalytic targeting subunits, which serve to enhance substrate availability and specificity. Furthermore, this enzyme is regulated by two heat and acid stable proteins, phosphatase inhibitors-1 and -2. Phosphatase Inhibitor-1 (“I-1”) is the main physiological modulator and is an effective inhibitor when phosphorylated on threonine-35 by PKA (Endo, S. et al., 1996 Biochemistry; 35(16): 5220-8). Inhibition of PP1, removes its opposition to the actions of PKA protein phosphorylation, leading to amplification of the β-agonist responses in the heart (Ahmad, Z. J. 1989 Biol Chem; 264:3859-63; Gupta, R. C. et al., 1996 Circulation; (Suppl 1):1-361).

[0308] This fine-tuning regulation of cardiac regulatory protein phosphorylation by protein kinases and phosphatases becomes even more important in heart failure, since decreases in cAMP levels by desensitization of β-receptors (Koch, Lefkowitz et al. 2000) would be expected to lead to inactivation of PKA, while the levels and activity of protein phosphatase 1 are increased.

[0309] That is phosphatase activity is increased in heart failure. Reducing phosphatase activity (e.g., phosphatase 1 activity) in cardiomyocytes can relieve one or more symptoms of associated with heart failure. Reduced phosphatase activity is associated with attenuated β-adrenergic responsiveness. Accordingly, expression of a phosphatase inhibitor in heart cells can be used to treat cardiac disorders, e.g., heart failure. Decreasing phosphatase activity can improve β-adrenergic responsiveness.

[0310] Accordingly, one aspect of the disclosure is a method of treating a subject having heart failure comprising administering a rAAV vector expressing an inhibitor the phosphorylation activity of PKC-α.

[0311] In one embodiment, phosphatase activity can be decreased by inhibiting type 1 phosphatases (PP1). Type 1 phosphatases include, but are not limited to PP1cα, PP1cβ, PP1cδ and PP1cγ. See Sasaki et. al. (1990) Jpn J Cancer Res. 81: 1272-1280, the contents of which are incorporated herein by reference. The phosphatase inhibitor-1 (or “I-1”) protein is an endogenous inhibitor of type 1 phosphatase. Increasing I-1 levels or activity can restore β-adrenergic responsiveness in failing human cardiomyocytes.

[0312] In specific embodiments, the rAAV vector comprises a nucleic acid encoding a constitutively active I-1 protein. One such rAAV vector comprises a nucleic acid encoding I-1T35D, which comprises a truncation of the I-1 cDNA to encode for the first 65 amino acids and introduction of nucleotide changes to replace the PKA phosphorylation site (GGT: Thr35) with aspartic acid (GTC: Asp35), resulting in a constitutively active inhibitor. In some embodiments, the rAAV vector comprises a nucleic acid construct encoding a constitutively active I-1 protein, where threonine 35 is replaced with glutamic acid instead of aspartic acid. These substitutions can also be made in a full length inhibitor molecule. Failing human cardiomyocytes expressing I-1T35D exhibit normal contractile function under basal conditions and their beta adrenergic function is restored to normal. Thus, delivery of inhibitor-1 completely restores function and reverses remodeling in the setting of pre-existing heart failure.

[0313] The rAAV vector as disclosed herein can comprise nucleic acid sequences encoding other phosphatase inhibitors and other variants of I-1. For examples, in some embodiments a rAAV vector as disclosed herein can comprise a nucleic acid encoding any one or more of the inhibitors selected from: phosphatase inhibitor 2 (PP2); okadaic acid or caliculin; and nippl which is an endogenous nuclear inhibitor of protein phosphatase 1. In one embodiment, the rAAV vector as disclosed herein comprises a nucleic acid encoding a phosphatase inhibitor is specific for protein phosphatase 1 (PP1). Examples of proteins that modulate cardiac activity include, but are not limited to: a protein that modulates phosphatase activity (e.g., a phosphatase type 1 inhibitor, e.g., I-1) or a sacroplasmic reticulum Ca2+ ATPase (SERCA), e.g., SERCA1 (e.g., 1a or 1b), SERCA2 (e.g., 2a or 2b), or SERCA3.

[0314] In some embodiments, a method of treatment according to an embodiment of the technology described herein comprises introduction into the heart cells of the subject, a rAAV vector comprising a nucleic acid sequence encoding a mutant form of phosphatase inhibitor-1 protein, wherein the mutant form comprises at least one amino acid at a position that is a PKC-α phosphorylation site in the wild type, wherein the at least one amino acid is constitutively unphosphorylated or mimics an unphosphorylated state in the mutant form.

### (I) Phosphatase Inhibitor Protein-1 (I-1) and Constitutively Active I-1 (I-1c) as Inhibitors of Protein Phosphatase 1 (PP1)

[0315] Phosphatase Inhibitor Protein-I (I-1) is a key regulator of cardiac contractility. I-1 is also known as Type-1 phosphtatase (PP1 or PP-1) is known to regulate cardiac contractility by inhibiting the activity of Protein Phosphatase-1 (“PP-1”). I-1′s ability to inhibit PP-1 is further known to be regulated by phosphorylation. When threonine 35 of I-1 is phosphorylated by Protein Kinase A (PKA), PP-1 activity is inhibited, cardiac contractility is enhanced (Pathak, A., et al. 2005 Circ Res 15:756′-66).

[0316] In one embodiment, phosphatase activity can be decreased by inhibiting type 1 phosphatases (PP1). Type 1 phosphatases include, but are not limited to PP1cα, PP1cβ, PP1cδ and PP1cγ. See Sasaki et. al. (1990) Jpn J Cancer Res. 81: 1272-1280, the contents of which are incorporated herein by reference. The phosphatase inhibitor-1 (or “I-1”) protein is an endogenous inhibitor of type 1 phosphatase. Increasing I-1 levels or activity can restore β-adrenergic responsiveness in failing human cardiomyocytes.

[0317] In specific embodiments, a constitutively active I-1 protein can be administered. One such construct exemplified herein (I-1T35D) entails truncation of the I-1 cDNA to encode for the first 65 amino acids and introduction of nucleotide changes to replace the PKA phosphorylation site (GGT: Thr35) with aspartic acid (GTC: Asp35), resulting in a constitutively active inhibitor. Another way to make a constitutively active inhibitor is to substitute threonine 35 with glutamic acid instead of aspartic acid. These substitutions can also be made in a full length inhibitor molecule. Failing human cardiomyocytes expressing I-1T35D exhibit normal contractile function under basal conditions and their beta adrenergic function is restored to normal. Thus, delivery of inhibitor-1 completely restores function and reverses remodeling in the setting of pre-existing heart failure.

[0318] The nucleic acid encoding I-1 is shown as follows:

agtgtccccg gagccgcgag ctgggagcgc tgtgccggga gccgggagcc gagcgcgccg 60
ggctggggcc ggggccggag cggagcggag agggagcgcg cccgccccag ccccgagtcc 120
cgccgccttc cctcccgccg cagcgcgggc ccaccggccg ccgccccagc catggagcaa 180
gacaacagcc cccaaaagat ccagttcacg gtcccgctgc tggagccgca ccttgacccc 240
gaggcggcgg agcagattcg gaggcgccgc cccacccctg ccaccctcgt gctgaccagt 300
gaccagtcat ccccagagat agatgaagac cggatcccca acccacatct caagtccact 360
ttggcaatgt ctccacggca acggaagaag atgacaagga tcacacccac aatgaaagag 420
ctccagatga tggttgaaca tcacctgggg caacagcagc aaggagagga acctgagggg 480
gccgctgaga gcacaggaac ccaggagtcc cgcccacctg ggatcccaga cacagaagtg 540
gagtcaaggc tgggcacctc tgggacagca aaaaaaactg cagaatgcat ccctaaaact 600
cacgaaagag gcagtaagga acccagcaca aaagaaccct caacccatat accaccactg 660
gattccaagg gagccaactc ggtctgagag aggaggaggt atcttgggat caagactgca 720
gtttgggaat gcatggacac cggatttgtt tcttattcct tcacttttgg ggaaaatctc 780
ttgtttttaa aaagtgataa atttggtgtt aggtccttgg cactttcctt cttttccaac 840
tgggagaatc ctttctccct gccttcttgc cctgccctct ctgtagcccc caccctcctg 900
ccaagctgcc tctgggaagg aagaaacagg agctaggcag aagccttgag cagggaagag 960
ttcttccctt agccctgact ttacttgctg tgggaagaga gatgagggtc agataggtgg 1020
gaggactaac ttccagggtg ccaagaagga agaaaagccc caggttctct tttcttattg 1080
aggaacgatc cgaccacctc acaggcctgc cctgcagctg gaagactcgg cgctctaagg 1140
cctgtgccgt gtccagctgt gactgtgcgg tgggctccat ctgctggaca aaaggggaac 1200
tgcaccatgg cacttggccc atgggaaaga gggtgtggtg gtgtgccaat acctcctcgc 1260
ctgccctcca agccccagct gccttccttt tggattccca agcttcagga tgtgttccct 1320
cttccagctg tgggaccgct gtcccttatt tcaacccgtt agcaacaatg gatagagaac 1380
acagtggcta ttaatgaaga ggcccatgct ggagactgga agggttccct tgtcctagac 1440
attgaggggc ccagataaga ccaaaaccaa gcataagaga agaaactgtc tcagatctca 1500
cggccaggcc tctctcctgc tgctgttttt gattttccca ggtagtggga gagaggaaag 1560
gagggaaggc aagattcttt ccccctccct gctgaagcat gtggtacaga ggcaagagca 1620
gagcctgaga agcgtcaggt cccacttctg ccatgcagct actatgagcc ctcggggcct 1680
cctcctgggc ctcagcttgc ccagatacat acctaaatat atatatatat atatgaggga 1740
gaacgcctca cccagatttt atcatgctgg aaagagtgta tgtatgtgaa gatgcttggt 1800
caacttgtac ccagtgaaca cacaaaaaaa aaaaaaaaa 1839
(SEQ ID NO: 2)

[0319] In some embodiments of the methods and compositions as disclosed herein, the rAAV vector comprises a nucleic acid sequence encoding a I-1 or I-1c protein of amino acids SEQ ID NO: 1 ora modified variant of SEQ ID NO: 1. In some embodiments, the rAAV vector comprises a nucleic acid sequence of SEQ ID NO: 2, or a fragment thereof, wherein the fragment of SEQ ID NO: 2 encodes amino acids 1-65 of SEQ ID NO: 1, or a fragment from amino acid 1 to C-terminal amino acid 70, 67, 66, 65, or 61, or 54 of SEQ ID NO: 1, where threonine at position 35 of SEQ ID NO: 1 is replaced with an aspartic acid (T35D). In some embodiments of the methods and compositions as disclosed herein, the rAAV vector comprises a nucleic acid sequence encoding a I-1 or I-1c protein which is a codon optimized nucleic acid sequence, for enhanced expression in vivo and/or to reduce CpG islands, and/or to reduce the innate immune response. Exemplary codon optimized I-1 or I-1c nucleic sequences encompassed for use in the methods and rAAV compositions as disclosed herein can be used, or a nucleic acid sequence having at least 60%, or 70%, or 80%, 85% or 90% or 95%, or 98%, or 99% sequence identity to SEQ ID NO: 2 or a portion thereof, or SEQ ID NOS: 385-412, which is codon optimized according to methods known in the art, or a nucleic acid sequence that has at least 81%, 82%, 83%, 84%, 85%, 86%, 87%, 88%, 89%, 90%, 91%, 92%, 93%, 94%, 95%, 96%, 97%, 98%, or 99% sequence identity to any of SEQ ID NO: 2 or 385-412.

[0320] In addition, in some embodiments, the I-1 or I-1c nucleic acid sequences encompassed for use in the methods and rAAV compositions as disclosed herein are further modified with at least one or more of the following modifications: (i) removal of at least one, or two or in some embodiments, all alternative reading frames, (ii) removal of one or more CpGs islands, (iii) modification of the Kozak sequence, (iv) modification of a translational terminator sequence, and (v) removal of a spacer between promoter and Kozak sequence.

[0321] In some embodiments of the methods and compositions as disclosed herein, the human I-1 protein expressed by the AAV is encoded by a codon optimized nucleic acid sequence, for example, a sequence selected from any of SEQ ID NO: 385-412. In some embodiments of the methods and compositions as disclosed herein, the I-1 protein expressed by the rAAV vector is encoded by a nucleic acid sequence having at least 60%, or 70%, or 80%, 85% or 90% or 95%, or 98%, or 99% sequence identity to SEQ ID NOS: 385-412. In some embodiments, such a nucleic acid sequence having at least 60%, or 70%, or 80%, 85% or 90% or 95%, or 98%, or 99% sequence identity to SEQ ID NOS: 385-412 can be assessed using in vitro assays as disclosed in the Examples herein, or using cardiomyocytes from failing hearts (e.g., tissues from failing left ventricles (LV)) where PP1 activity can be assayed with 32P-labeled rabbit glycogen phosphorylase as the substrate. To maintain the phosphorylation status of I-1, PP2A (okadaic acid, 4 nM) and calcineurin phosphatase (EDTA, 0.5 mM) inhibitors can be included in preparations of tissue extracts and in the enzyme reactions), as disclosed in Carr, et al. “Type 1 phosphatase, a negative regulator of cardiac function.” Molecular and cellular biology 22.12 (2002): 4124-4135; which is incorporated herein in its entirety by reference.

[0322] In some embodiments, such a nucleic acid sequence having at least 60%, or 70%, or 80%, 85% or 90% or 95%, or 98%, or 99% sequence identity to SEQ ID NOS: 385-412 can also be assessed using in vivo and in vitro assays as disclosed in the Examples herein and disclosed in Patkak et al, e.g., by assessing in vivo cardiac function by non-invasive echocardiography and echocardiographic assessment, and in vitro contractility was examined using the Langendorff perfusion system. Cardiac catheritization and pressure-volume loop measurements in the murine heart can also be performed, as disclosed in Patjak, et al. “Enhancement of cardiac function and suppression of heart failure progression by inhibition of protein phosphatase 1.” Circulation research 96.7 (2005): 756-766, which is incorporated herein in its entirety by reference.

[0323] The amino acid sequence of I-1 is as follows:

MEQDNSPQKIQFTVPLLEPH LDPEAAEQIRRRRPT PATLV LTSDQSSPEIDEDRIPNPHL
KSTLAMSPRQRKKMTRITPT MKELQMMVEHHLGQQQQGEE PEGAAESTGTQESRPPGIPD
TEVESRLGTSGTAKKTAECI PKTHERGSKEPSTKEPSTHI PPLDSKGANSV* (SEQ ID NO: 1)

[0324] To determine the long-term in vivo effects of decreased protein phosphatase 1 activity, we expressed a constitutively active, truncated inhibitor-1 (I1c) in a cardiomyocyte restricted manner. This form of inhibitor-1 was chosen because it specifically inhibits protein phosphatase 1, albeit at higher concentration than the native phosphorylated inhibitor.

[0325] Accordingly, in some embodiments, the rAAV vector disclosed herein comprises a nucleic acid sequence encoding a polypeptide comprising amino acids 1-65 of SEQ ID NO: 1, wherein threonine at position 35 of SEQ ID NO: 1 is replaced with an aspartic acid (T35D); and wherein said nucleic acid sequence is operably linked to a cardiac-specific promoter as disclosed in Table 2A, 3 or 4 herein. In some embodiments, the I-1 protein or a functional variant thereof is expressed in the heart of the subject in an amount effective to increase cardiac contractility and reduce morphological deterioration associated with cardiac remodeling in the subject with existing heart failure.

[0326] In some embodiments, the rAAV vector disclosed herein comprises a nucleic acid sequence encoding a constitutively active fragment of I-1 (I-1c), wherein I-1c is a polypeptide comprising amino acids of SEQ ID NO: 1, wherein SEQ ID NO: 1 is truncated at the C-terminus at amino acid 70, 67, 66, 65, or 61, or 54, and where the there is an aspartic acid at position 35 (T35D).

[0327] The I-1 polypeptide is described in U.S. Pats. 9,114,148, which is incorporated herein in its entirety by reference. In some embodiments, the I-1 polypeptide can comprise a secretory signal (SS). In some embodiments, one of ordinary skill in the art can appreciate particular positions of I-1 or I-1c which a secretory signal peptide (SS) can be fused. Accordingly, in one aspect the invention relates to a I-1 protein, beginning at amino acid 1 and terminating at amino acid 70, 67, 66, 65, or 61, or 54 of human I-1 of SEQ ID NO: 1, or a modified I-1 protein of SEQ ID NO: 1, where there is an aspartic acid at position 35 (T35D) of SEQ ID NO: 1.

[0328] In some embodiments of the methods and compositions as disclosed herein, the human I-1 protein expressed by the AAV comprises amino acids of SEQ ID NO: 1, or fragments or variants thereof, for example a I-1 protein beginning at residue 70, 67, 66, 65, or 61, or 54 of SEQ ID NO: 1. In some embodiments of the methods and compositions as disclosed herein, the I-1 protein expressed by the rAAV vector comprises amino acids beginning at any one or 70, 67, 66, 65, or 61, or 54 of SEQ ID NO: 1, or a protein at least 60%, or 70%, or 80%, 85% or 90% or 95%, or 98%, or 99% identical to SEQ ID NO: 1, beginning at amino acids 70, 67, 66, 65, or 61, or 54. In some embodiments of the methods and compositions as disclosed herein, the I-1 protein expressed by the rAAV comprises amino acids beginning at residue 70, 67, 66, 65, or 61, or 54 of SEQ ID NO: 1, or a protein at least 60%, or 70%, or 80%, 85% or 90% or 95%, or 98%, or 99% identical thereto. In some embodiments, the I-1 protein expressed by the rAAV vector comprises amino acids of beginning at residue 70, 67, 66, 65, or 61, or 54 of any of SEQ ID NO: 1, where there is an aspartic acid at position 35 (T35D) of SEQ ID NO: 1, or a protein at least 60%, or 70%, or 80%, 85% or 90% or 95%, or 98%, or 99% identical thereto.

### (II) Evaluation of Different rAAV Vector Constructs and I-1c

[0329] In some embodiments, the effect of a rAAV vector as disclosed herein on phosphatase enzymatic activity can be evaluated in vitro. For example, protein phosphatase 1 activity can be assayed as described (Endo, S., et al. (1996) Biochemistry 35, 5220-5228) in a 30-µl reaction mixture containing 50 mM Tris.HCl (pH 7.4), 1 mM DTT, 0.5 mM MnCl2, 10 µM [32P]phosphorylase a, and 0.5 µg/ml PP1. The reaction is initiated by the addition of 1 µl of PP 1 to 20 µl of assay mixture containing the rest of the assay components. After 20 min at 30° C. the reaction is terminated by adding 10 µl of 50% trichloroacetic acid to the assay mixture. The assay mixture is then cooled on ice and centrifuged. A 20 µl aliquot from the supernatant was spotted onto filter paper and placed in a scintillation counter to determine the amount of released [32P]Pi. [32P]Phosphorylase a used for PP1 assays was prepared at 30° C. for 30 min as described. [32P]Phosphorylase a was dialyzed in 50 mM Tris.HCl, pH 7.4, 1 mM EDTA, 1 mM DTT and stored frozen at -80° C. until used (see also Huang et al. Proc Natl Acad Sci USA. 2000 May 23; 97(11):5824-9).

[0330] The efficacy of a rAAV vector as disclosed herein expressing an inhibitor of PP1, e.g., I-1, I-1c or a variant thereof can be assessed by generating dose response curves from data obtained using various concentrations of the test compounds. Moreover, a control assay can also be performed to provide a baseline for comparison. In the control assay, the heart cell is incubated in the absence of a test compounds.

[0331] Table 17 shows, without being construed to any limitation exemplary nucleic acid sequences encoding I1c genes (SEQ ID NO: 385-412), where the rAAV vector can comprise a nucleic acid sequence selected from any of SEQ ID NOS 413-440, which comprise the I-1c nucleic acid and other components and flanked within left and right ITR sequences, or a nucleic acid sequence that has at least 81%, 82%, 83%, 84%, 85%, 86%, 87%, 88%, 89%, 90%, 91%, 92%, 93%, 94%, 95%, 96%, 97%, 98%, or 99% identity to SEQ ID NO: 413-440. Exemplary close ended linear duplex useful herein can comprises a nucleic acid sequence selected from of any of SEQ ID NO: 357-384, or a nucleic acid that has at least 81%, 82%, 83%, 84%, 85%, 86%, 87%, 88%, 89%, 90%, 91%, 92%, 93%, 94%, 95%, 96%, 97%, 98%, or 99% identity thereto.

| | | |
|---|---|---|
| ITR-ITR + backbone | I-1c | Left ITR-right ITR |
| SEQ ID NO: 357 | SEQ ID NO: 385 | SEQ ID NO: 413 |
| SEQ ID NO: 358 | SEQ ID NO: 386 | SEQ ID NO: 414 |
| SEQ ID NO: 359 | SEQ ID NO: 387 | SEQ ID NO: 415 |
| SEQ ID NO: 360 | SEQ ID NO: 388 | SEQ ID NO: 416 |
| SEQ ID NO: 361 | SEQ ID NO: 389 | SEQ ID NO: 417 |
| SEQ ID NO: 362 | SEQ ID NO: 390 | SEQ ID NO: 418 |
| SEQ ID NO: 363 | SEQ ID NO: 391 | SEQ ID NO: 419 |
| SEQ ID NO: 364 | SEQ ID NO: 392 | SEQ ID NO: 420 |
| SEQ ID NO: 365 | SEQ ID NO: 393 | SEQ ID NO: 421 |
| SEQ ID NO: 366 | SEQ ID NO: 394 | SEQ ID NO: 422 |
| SEQ ID NO: 367 | SEQ ID NO: 395 | SEQ ID NO: 423 |
| SEQ ID NO: 368 | SEQ ID NO: 396 | SEQ ID NO: 424 |
| SEQ ID NO: 369 | SEQ ID NO: 397 | SEQ ID NO: 425 |
| SEQ ID NO: 370 | SEQ ID NO: 398 | SEQ ID NO: 426 |
| SEQ ID NO: 371 | SEQ ID NO: 399 | SEQ ID NO: 427 |
| SEQ ID NO: 372 | SEQ ID NO: 400 | SEQ ID NO: 428 |
| SEQ ID NO: 373 | SEQ ID NO: 401 | SEQ ID NO: 429 |
| SEQ ID NO: 374 | SEQ ID NO: 402 | SEQ ID NO: 430 |
| SEQ ID NO: 375 | SEQ ID NO: 403 | SEQ ID NO: 431 |
| SEQ ID NO: 376 | SEQ ID NO: 404 | SEQ ID NO: 432 |
| SEQ ID NO: 377 | SEQ ID NO: 405 | SEQ ID NO: 433 |
| SEQ ID NO: 378 | SEQ ID NO: 406 | SEQ ID NO: 434 |
| SEQ ID NO: 379 | SEQ ID NO: 407 | SEQ ID NO: 435 |
| SEQ ID NO: 380 | SEQ ID NO: 408 | SEQ ID NO: 436 |
| SEQ ID NO: 381 | SEQ ID NO: 409 | SEQ ID NO: 437 |
| SEQ ID NO: 382 | SEQ ID NO: 410 | SEQ ID NO: 438 |
| SEQ ID NO: 383 | SEQ ID NO: 411 | SEQ ID NO: 439 |
| SEQ ID NO: 384 | SEQ ID NO: 412 | SEQ ID NO: 440 |

### Animal Models

[0332] Important prerequisites for successful studies of cardiovascular gene therapy are (1) constitution of an animal model that is applicable to clinical cardiovascular disease that can provide useful data regarding mechanisms for increased blood flow and/or contractile function, and (2) accurate evaluation of the effects of gene transfer. Thus, in some embodiments, a porcine models can be used. The pig is a particularly suitable model for studying a cardiovascular condition, including heart diseases of humans because of its relevance to human physiology. The pig heart closely resembles the human heart in the following ways. The pig has a native coronary circulation very similar to that of humans, including the relative lack of native coronary collateral vessels. Secondly, the size of the pig heart, as a percentage of total body weight, is similar to that of the human heart. Additionally, the pig is a large animal model, therefore allowing more accurate extrapolation of various parameters such as effective vector dosages, toxicity, etc. In contrast, the hearts of animals such as dogs and members of the murine family have a lot of endogenous collateral vessels. Additionally, relative to total body weight, the size of the dog heart is twice that of the human heart.

[0333] An exemplary porcine model is a myocardial ischemia porcine model, which mimics clinical coronary artery disease, is described in U.S. Application 2003/0148968, which is incorporated herein in its entirety by reference. Based on published studies, those skilled in the art will appreciate that the results in a pig model are expected to be predictive of results in humans.

[0334] Another animal model, described in Example 1 of U.S. Application 2003/0148968 can also be used, which induces dilated cardiomyopathy such as that observed in clinical congestive heart failure.

[0335] Thus, these models can be used to determine whether the methods of administration of a rAAV vector as disclosed herein, and/or the rAAV vector encoding an inhibitor of PP1 (e.g., I-1, I-1c or a variant thereof) and/or another therapeutic protein (e.g., angiogenic protein or peptide) is effective to alleviate at least one cardiac dysfunctions associated with these conditions. These models are particularly useful in providing some of the parameters by which to assess the effectiveness of in vivo gene therapy for the treatment of congestive heart failure and ventricular remodeling.

### (Iii) Other Agents to Be Expressed by rAAV Vectors for the Treatment of Heart Failure

[0336] In some embodiments, the rAAV vector as disclosed herein can express other phosphatase inhibitors and other variants of I-1. Examples of such other inhibitors include phosphatase inhibitor 2; okadaic acid or caliculin; and nippl which is an endogenous nuclear inhibitor of protein phosphatase 1. In one embodiment, the phosphatase inhibitor is specific for protein phosphatase 1.

[0337] In some embodiments, the rAAV vector as disclosed herein can express other therapeutic agents to treat heart failure, e.g., adenylyl cyclase 6 (AC6, also referred to as adnenylyl cyclase VI), S100A1, β-adrenergic receptor kinase-ct (βARKct), sarco/endoplasmic reticulum (SR) Ca -ATPase (SERCA2a), IL-18, VEGF, VEGF activators, urocortins, and B-cell lymphoma 2 (Bcl2)-associated anthanogene-3 (BAG3).

[0338] Table 18A: Exemplary genes to be encoded by a rAAV vector comprising a synthetic cardiac-specific promoter as disclosed herein.

| Protein | mRNA sequence ID | SEQ ID NO: | Amino acids of Transcript Variants |
|---|---|---|---|
| VEGF (VEGF-A) | NM_001025366 | 450 | See, e.g., SEQ ID NOS: 95-99 and 140-151 of U.S. Pat. 10/086,043 |
| activin A | NM_001105 | 451 | See, e.g., SEQ ID NO: 152 of U.S. Pat. 10/086,043 |
| activin B | NM_002193.2 | 452 | N/A |
| insulin-like growth factor (IGF1) | NM_000618 | 453 | See, e.g., SEQ ID NOS: 153-155 of U.S. Pat. 10/086,043 |
| bone morphogenic protein | NM_006132 | 454 | See, e.g., SEQ ID NOS: 156-157 of U.S. Pat. 10/086,043 |
| fibroblast growth factor | NM_000800 | 455 | See, e.g., SEQ ID NOS: 158-162 of U.S. Pat. 10/086,043 |
| platelet-derived growth factor | NM_002607 | 456 | See, e.g., SEQ ID NO: 163 of U.S. Pat. 10/086,043 |
| insulin, leukemia inhibitory factor (LIF) | NM_002309 | 457 | N/A |
| epidermal growth factor (EGF) | NM_001178130 | 458 | See, e.g., SEQ ID NOS: 164-165 of U.S. Pat. 10/086,043 |
| TGFalpha | NM_001099691 | 459 | See, e.g., SEQ ID NO: 166 of U.S. Pat. 10/086,043 |
| TDGF1 | NM_003212 | 460 | See, e.g., SEQ ID NO: 167 of U.S. Pat. 10/086,043 |
| vWF | NM_000552 | 461 | N/A |
| GATA-4 | NM_002052 | 462 | N/A |
| Nkx2.5 | NM_001166175 | 463 | See, e.g., SEQ ID NOS: 168-169 of U.S. Pat. 10/086,043 |
| Mef2-C | NM_002397 | 464 | See, e.g., SEQ ID NOS: 170-174 of U.S. Pat. 10/086,043 |
| LGMD-2B; limb girdle dystrophy 2B (Dysferlin) | NM_003494 | 465 | See, e.g., SEQ ID NOS: 175-187 of U.S. Pat. 10/086,043 |
| Dystrophin (DMD) | NM_004006 | 466 | See, e.g., SEQ ID NOS: 188-204 of U.S. Pat. 10/086,043 |
| Emerin (EMD) | NM_0001 17 | 467 | N/A |
| Lamin A/C | NM_170707 | 468 | See, e.g., SEQ ID NOS: 205-206 of U.S. Pat. 10/086,043 |
| alpha-1 anti-trypsin (A I AT) | NM_001002235 | 469 | See, e.g., SEQ ID NOS: 207-216 of U.S. Pat. 10/086,043 |
| CFTR | NM_000492 | 470 | N/A |
| ANG | NM_001097577 | 471 | See, e.g., SEQ ID NO: 217 of U.S. Pat. 10/086,043 |
| Presenilin (PSEN2) | NM_000447 | 472 | See, e.g., SEQ ID NO: 218 of U.S. Pat. 10/086,043 |
| Isl1 | NM_002202 | 473 | N/A |
| SERCA 1a (ATP2A1) | NM_004320 | 474 | See, e.g., SEQ ID NO: 219 of U.S. Pat. 10/086,043 |
| SERCA2a (ATP2A2) | NM_001681 | 475 | See, e.g., SEQ ID NO: 220 of U.S. Pat. 10/086,043 |
| Phospholamban (PLN) | NM_002667 | 476 | N/A |
| βARK (ADRBK1, GRK2, BARK1) | NM_001619 | 477 | N/A |
| beta-adrenergic receptor (ADRB1) | NM_000684 | 478 | N/A |
| Akt (AKT1) | NM_005163 | 479 | See, e.g., SEQ ID NOS: 221-222 of U.S. Pat. 10/086,043 |
| adenylyl cyclase VI (ADCY6) | NM_020983 | 480 | 223 |
| FGF 1 | NM_000800 | 481 | See, e.g., SEQ ID NOS: 241-245 of U.S. Pat. 10/086,043 |
| FGF 2 (FGFB) | NM_002006 | 482 | N/A |
| FGF 4 | NM_002007 | 483 | N/A |
| FGF 5 | NM_004464 | 484 | See, e.g., SEQ ID NO: 246 of U.S. Pat. 10/086,043 |
| HGF | NM_000601 | 485 | See, e.g., SEQ ID NOS: 247-250 of U.S. Pat. 10/086,043 |
| Ang1 (ANGPT1; angiopoietin1) | NM_001146 | 486 | See, e.g., SEQ ID NOS: 251, 353-354 of U.S. Pat. 10/086,043 |
| MGP1 (Matrix Gla Protein) | NM_000900 | 487 | See, e.g., SEQ ID NO: 252 of U.S. Pat. 10/086,043 |
| OMG (oligodendrocyte myelin glycoprotein) | NM_002544 | 488 | N/A |
| G-CSF (CSF3; Colony Stimulating Factor 3) | NM_172220 | 489 | See, e.g., SEQ ID NO: 253-255 of U.S. Pat. 10/086,043 |
| PDGF (PDGFA) | NM_002607 | 490 | See, e.g., SEQ ID NO: 256 of U.S. Pat. 10/086,043 |
| IGF1 | NM_000618 | 491 | See, e.g., SEQ ID NO: 257-259 of U.S. Pat. 10/086,043 |
| IGF2 | NM_000612 | 492 | See, e.g., SEQ ID NOs: 260-261 of U.S. Pat. 10/086,043 |
| EGR1 | NM_001964 | 493 | N/A |
| Prax1 (benzodiazapine receptor associated protein 1; BZRAP1; PRAX-1, KIAA0612) | NM_004758 | 494 | See, e.g., SEQ ID NO: 262 of U.S. Pat. 10/086,043 |
| Neuregulin 1 (NRG1, GGF) | NM_001159995 | 495 | See, e.g., SEQ ID NOS: 263-278 of U.S. Pat. 10/086,043 |
| ErbB4 (ERBB4) | NM_001042599 | 496 | See, e.g., SEQ ID NO: 279 of U.S. Pat. 10/086,043 |
| Periostin (POSTN) | NM_006475 | 497 | 280-282 of U.S. Pat. 10/086,043 |
| HAND1 | NM_004821 | 498 | N/A |
| E2F4 | NM_001950 | 499 | N/A |
| Skp2 | NM_005983 | 500 | See, e.g., SEQ ID NOS: 283-284 of U.S. Pat. 10/086,043 |
| Akt1 | NM_005163 | 501 | See, e.g., SEQ ID NOS: 285-286 of U.S. Pat. 10/086,043 |
| BAG3 | NM_004281 | 502 | |
| I-1c | I-1c (T35D) | 507 | |
| truncated I-1c (aal-54;T35D) | I-1c (1-54)(T35D) | 527 | |
| truncated I-1c (aal-61;T35D) | I-1c (1-61)(T35D) | 528 | |
| truncated I-1c (aal-66;T35D) | I-1c (1-66)(T35D) | 529 | |
| truncated I-1c (aal-67;T35D) | I-1c (1-67)(T35D) | 530 | |
| truncated I-1c (aal-70;T35D) | I-1c (1-77)(T35D) | 531 | |
| truncated I-1c (aal-77;T35D) | I-1c (1-77)(T35D) | 532 | |
| β-adrenergic receptor kinase-carboxyl terminus (βARKct), | NM_001619 | 503 | Last 194 aa of c-terminus of βARK 1 (NM_001619) |
| S100A1 | NM_006271 | 504 | |
| IL-18 binding protein (IL-18BP) | SEQ ID NO: 1 in U.S. Pat. 7,799,541 | 505 | As disclosed in WO 99/09063 and US9,566,313, US20140112915 |
| Urocortin (UCN) | NM_003353 | 506 | |

[0339] Table 18B: Exemplary therapeutic agents to be expressed by the rAAV vectors for the treatment of arrhythmia or myopathy

| Protein | mRNA sequence ID | SEQ ID NO: | Transcript Variants SEQ ID NO |
|---|---|---|---|
| HERG (LQT2, short QT - Ikr, Kv11.1; KCNH2) | NM_000238 | 508 | 2 See, e.g., SEQ ID NOS: 87-289 of U.S. Pat. 10/086,043 |
| KCNQ1 (LQT - Iks; KCNA9) | NM_000218 | 509 | N/A |
| SCN5A (LQT3, Brugada) | NM_198056 | 510 | See, e.g., SEQ ID NOS: 290-294 of U.S. Pat. 10/086,043 |
| ANK2 (Ankyrin B; LQT4) | NM_001148 | 511 | See, e.g., SEQ ID NOS: 295-296 of U.S. Pat. 10/086,043 |
| KCNE1 (LQT5; MinK, ISK, JLNS2) | NM_000219 | 512 | See, e.g., SEQ ID NOS: 297-299 of U.S. Pat. 10/086,043 |
| KCNE2 (LQT6; MiRP1) | NM_172201 | 513 | N/A |
| KCNJ2 (LQT7, short QT; Kir2.1, IRK1) | NM_000891 | 514 | N/A |
| CACNA1c (LQT8, Brugada; Cav1.2, CACH2, CACN2, TS) | NM_000719 | 515 | See, e.g., SEQ ID NOS: 300-321 of U.S. Pat. 10/086,043 |
| SCN4B (LQT10) | NM_001142348 | 516 | See, e.g., SEQ ID NOS: 322-323 of U.S. Pat. 10/086,043 |
| SERCA (CPVT; APT2A1) | NM_004320 | 517 | See, e.g., SEQ ID NO: 324 of U.S. Pat. 10/086,043 |
| KCNQ2 (short QT; Kv7.2, ENB1, BFNC, KCNA11, HNSPC) | NM_172109 | 518 | See, e.g., SEQ ID NOS: 325-328 of U.S. Pat. 10/086,043 |
| SCN1B (Brugada) | NM_001037 | 519 | See, e.g., SEQ ID NO: 329 of U.S. Pat. 10/086,043 |
| KCNE3 (Brugada; MiRP2, HOKPP) | NM_005472 | 520 | N/A |
| Nebulin (NEB) (Nemaline myopathy) | NM_004543 | 521 | See, e.g., SEQ ID NOS: 330-331 of U.S. Pat. 10/086,043 |
| MTM1 (myotubularin 1) (X-linked myotubular myopathy) | NM_000252 | 522 | N/A |
| Lamin A/C (LMNA; LMN1; PRO1; LMNL1) | NM_170707 | 523 | See, e.g., SEQ ID NOS: 332-333 of U.S. Pat. 10/086,043 |
| Emerin (EMD) | NM_000117 | 524 | N/A |
| Desmin (DES; CMD1I, CSM1, CSM2) | NM_001927 | 525 | N/A |
| Delta-sarcoglycan (SGCD; DAGD, LGMD2F, CMD1L) | NM_000337 | 526 | See, e.g., SEQ ID NOS: 334-335 of U.S. Pat. 10/086,043 |

[0340] In some embodiments, the rAAV vector encodes a nucleic acid sequence as disclosed in Table 1, 2, 3, 4, 5, 6 or 7 of U.S. Pat. 10/086,043, which is incorporated in its entirety by reference.

[0341] In some embodiments, the rAAV vector for use in the methods and compositions as disclosed herein comprises a nucleic acid sequence that encodes a protein disclosed in Table 18A or variant thereof, where the nucleic acid sequence is selected from any of: SEQ ID NOS: 1, 450-507, or 527-532 or a variant thereof having at least 80%, or at least 85%, or at least 90%, or at least 95% or at least 98% sequence identity to any of SEQ ID NOS: 1, 450-507, or 527-532. In some embodiments, the rAAV vector for use in the methods and compositions as disclosed herein comprises a nucleic acid sequence that is codon optimized that encodes for a protein or variant of a protein selected from any in Table 18A, where the codon optimized nucleic acid sequence is a codon optimized nucleic acid sequence selected from any of selected from any of: SEQ ID NOS: 1, 450-507, or 527-532 and has at least 60%, or at least 70% or at least 80%, or at least 85%, or at least 90%, or at least 95% or at least 98% sequence identity to SEQ ID NOS: SEQ ID NOS: 1, 450-507, or 527-532. In some embodiments, rAAV vector comprises a nucleic acid sequence encoding any of SEQ ID NOS: 1, 450-507, or 527-532, and is codon optimized to have at least 50%, or 60% or 70% or 75%, 80%, 85%, 90%, 95% reduced CpG site content relative to the CpG site content of the nucleic acid sequence of SEQ ID NOS: 1, 450-507, or 527-532.

[0342] In some embodiments, the rAAV vector for use in the methods and compositions as disclosed herein comprises a nucleic acid sequence that encodes a protein disclosed in Table 18B or variant thereof, where the nucleic acid sequence is selected from any of: SEQ ID NOS: 508-526 or a variant thereof having at least 80%, or at least 85%, or at least 90%, or at least 95% or at least 98% sequence identity to any of SEQ ID NOS: 508-526. In some embodiments, the rAAV vector for use in the methods and compositions as disclosed herein comprises a nucleic acid sequence that is codon optimized that encodes for a protein or variant of a protein selected from any in Table 18B, where the codon optimized nucleic acid sequence is a codon optimized nucleic acid sequence selected from any of selected from any of: SEQ ID NOS: 508-526 and has at least 60%, or at least 70% or at least 80%, or at least 85%, or at least 90%, or at least 95% or at least 98% sequence identity to SEQ ID NOS: SEQ ID NOS: 508-526. In some embodiments, rAAV vector comprises a nucleic acid sequence encoding any of SEQ ID NOS: 508-526 and is codon optimized to have at least 50%, or 60% or 70% or 75%, 80%, 85%, 90%, 95% reduced CpG site content relative to the CpG site content of the nucleic acid sequence of SEQ ID NOS: 508-526.

[0343] In some embodiments, the rAAV vector encodes a nucleic acid for increasing angiogenesis, e.g., an angiogenic protein, as defined herein. Angiogenesis refers generally to the development and differentiation of blood vessels. A number of proteins, typically referred to as “angiogenic proteins,” are known to promote angiogenesis. Such angiogenic proteins include members of the fibroblast growth factor (FGF) family, the vascular endothelial growth factor (VEGF) family, the platelet-derived growth factor (PDGF) family, the insulin-like growth factor (IGF) family, and others. For example, the FGF and VEGF family members have been recognized as regulators of angiogenesis during growth and development. The angiogenic activity of the FGF and VEGF families has been examined. For example, it has been shown that acidic FGF (“aFGF”) protein, within a collagen-coated matrix, when placed in the peritoneal cavity of adult rats, resulted in a well vascularized and normally perfused structure (Thompson et al., Proc. Natl. Acad. Sci. USA, 86: 7928-7932, 1989). Injection of basic FGF (“bFGF”) protein into adult canine coronary arteries during coronary occlusion reportedly led to decreased myocardial dysfunction, smaller myocardial infarctions, and increased vascularity in the bed at risk (Yanagisawa-Miwa et al., Science, 257: 1401-1403, 1992). Similar results have been reported in animal models of myocardial ischemia using bFGF protein (Harada et al., J. Clin. Invest., 94: 623-630, 1994; Unger et al., Am. J. Physiol., 266: H1588-H-1595, 1994). An increase in collateral blood flow was shown in dogs treated with VEGF protein (Banai et al. Circulation 89: 2183-2189, 1994).

[0344] In some embodiments, a rAVV vector as disclosed herein comprising a cardiac-specific promoter encodes one or more angiogenic proteins or peptide, such as, for example, FGF-5, FGF-4, aFGF, bFGF and/or a VEGF, or variants thereof. Suitable angiogenic proteins or peptides are exemplified by members of the family of fibroblast growth factors (FGF), vascular endothelial growth factors (VEGF), platelet-derived growth factors (PDGF), insulin-like growth factors (IGF), and others. Members of the FGF family include, but are not limited to, aFGF (FGF-1), bFGF (FGF-2), FGF-4 (also known as “hst/KS3”), FGF-5, FGF-6. In some embodiments, the rAAV vector disclosed herein encodes a secreted angiogenic protein, such as, FGF-4, FGF-5, or FGF-6 since these proteins contain functional secretory signal sequences and are readily secreted from cells. Many if not most human VEGF proteins (including but not limited to VEGF-121 and VEGF-165) also are readily secreted and diffusible after secretion. VEGF has been shown to be expressed by cardiac myocytes in response to ischemia in vitro and in vivo; it is a regulator of angiogenesis under physiological conditions as well as during the adaptive response to pathological states (Banai et al. Circulation 89:2183-2189, 1994). The VEGF family, includes, but is not limited to, members of the VEGF-A sub-family (e.g. VEGF-121, VEGF-145, VEGF-165, VEGF-189 and VEGF-206), as well as members of the VEGF-B sub-family (e.g. VEGF-167 and VEGF-186) and the VEGF-C sub-family. PDGF includes, e.g., PDGF A and PDGF B, and IGF includes, for example, IGF-1. Other angiogenic proteins or peptides are known in the art and new ones are regularly identified. The nucleotide sequences of genes encoding these and other proteins, and the corresponding amino acid sequences are likewise known in the art (see, e.g., the GENBANK sequence database).

[0345] Angiogenic proteins and peptides include peptide precursors that are post-translationally processed into active peptides and “derivatives” and “functional equivalents” of angiogenic proteins or peptides. Derivatives of an angiogenic protein or peptide are peptides having similar amino acid sequence and retaining, to some extent, one or more activities of the related angiogenic protein or peptide. As is well known to those of skill in the art, useful derivatives generally have substantial sequence similarity (at the amino acid level) in regions or domains of the protein associated with the angiogenic activity. Similarly, those of skill in the art will readily appreciate that by “functional equivalent” is meant a protein or peptide that has an activity that can substitute for one or more activities of a particular angiogenic protein or peptide. Preferred functional equivalents retain all of the activities of a particular angiogenic protein or peptide; however, the functional equivalent may have an activity that, when measured quantitatively, is stronger or weaker than the wild-type peptide or protein.

[0346] For details on the FGF family, see, e.g., Burgess, Ann. N.Y. Acad. Sci. 638: 89-97, 1991; Burgess et al. Annu. Rev. Biochem. 58: 575-606, 1989; Muhlhauser et al., Hum. Gene Ther. 6: 1457-1465, 1995; Zhan et al., Mol. Cell. Biol., 8: 3487, 1988; Seddon et al., Ann. N.Y. Acad. Sci. 638: 98-108, 1991. For human hst/KS3 (i.e. FGF-4), see Taira et al. Proc. Natl. Acad. Sci. USA 84: 2980-2984, 1987. For human VEGF-A protein, see e.g., Tischer et al. J. Biol. Chem. 206: 11947-11954, 1991, and references therein; Muhlhauser et al., Circ. Res. 77: 1077-1086, 1995; and Neufeld et al., WO 98/10071 (Mar. 12, 1998). Other variants of known angiogenic proteins have likewise been described; for example variants of VEGF proteins and VEGF related proteins, see e.g., Baird et al., WO 99/40197, (Aug. 12, 1999); and Bohlen et al., WO 98/49300, (Nov. 5, 1998). Combinations of angiogenic proteins and gene delivery vectors encoding such combinations are described in Gao et al. U.S. Ser. No. 09/607,766, filed Jun. 30, 2000, entitled “Dual Recombinant Gene Therapy Compositions and Methods of Use”, hereby incorporated by reference in its entirety. As is also appreciated by those of skill in the art, angiogenic proteins can promote angiogenesis by enhancing the expression, stability or functionality of other angiogenic proteins. Examples of such angiogenic proteins or peptides include, e.g., regulatory factors that are induced in response to hypoxia (e.g. the hypoxia-inducible factors such as Hif-1, Hif-2 and the like; see, e.g., Wang et al., Proc. Natl. Acad. Sci. USA 90(9): 4304-8, 1993; Forsythe et al., Mol. Cell. Biol. 16(9): 4604-13, 1996; Semenza et al., Kidney Int., 51(2): 553-5, 1997; and O’Rourke et al., Oncol. Res., 9(6-7): 327-32, 1997; as well as other regulatory factors, such as, for example, those that are induced by physiological conditions associated with cardiovascular disease, such as inflammation (e.g., inducible nitric oxide synthase (iNOS), as well as the constitutive counterpart, CNOS; see e.g., Yoshizumi et al., Circ. Res., 73(1): 205-9, 1993; Chartrain et al., J. Biol. Chem., 269(9): 6765-72, 1994; Papapetropoulos et al., Am. J. Pathol., 150(5): 1835-44, 1997; and Palmer, et al., Am. J. Physiol., 274(2 Pt 1): L212-9, 1998). Additional examples of such angiogenic proteins include certain insulin-like growth factors (e.g., IGF-1) and angiopoietins (Angs), which have been reported to promote and/or stimulate expression and/or activity of other angiogenic proteins such as VEGF (see e.g. Goad, et al, Endocrinology, 137(6):2262-68 (1996); Warren, et al., J. Bio. Chem., 271(46):29483-88 (1996); Punglia, et al, Diabetes, 46(10):1619-26 (1997); and Asahara, et al., Circ. Res., 83(3):233-40 (1998) and Bermont et al. Int. J. Cancer 85: 117-123, 2000). Similarly, hepatocyte growth factor (also referred to as Scatter factor), which has been reported to induce blood vessel formation in vivo (see, e.g., Grant et al. Proc. Natl. Acad. Sci. USA 90: 1937-1941, 1993) has also been reported to increase expression of VEGF (see, e.g., Wojta et al., Lab Invest. 79:427-438, 1999). Additional examples of angiogenic polypeptides include natural and synthetic regulatory peptides (angiogenic polypeptide regulators) that act as promoters of endogenous angiogenic genes. Native angiogenic polypeptide regulators can be derived from inducers of endogenous angiogenic genes. Hif, as described above, is one illustrative example of such an angiogenic gene which has been reported to promote angiogenesis by inducing expression of other angiogenic genes. Synthetic angiogenic polypeptide regulators can be designed, for example, by preparing multi-finger zinc-binding proteins that specifically bind to sequences upstream of the coding regions of endogenous angiogenic genes and which can be used to induce the expression of such endogenous genes. Studies of numerous genes has led to the development of “rules” for the design of such zinc-finger DNA binding proteins (see, e.g., Rhodes and Klug, Scientific American, February 1993, pp 56-65; Choo and Klug, Proc. Natl. Acad. Sci. USA, 91(23): 11163-7, 1994; Rebar and Pabo, Science, 263(5147): 671-3, 1994; Choo et al., J. Mol. Biol., 273(3): 525-32, 1997; Pomerantz et al., Science 267: 93-96, 1995; and Liu et al., Proc. Natl. Acad. Sci. USA, 94: 5525-5530, 1997. As will be appreciated by those of skill in the art, numerous additional genes encoding proteins or peptides having the capacity to directly or indirectly promote angiogenesis are regularly identified and new genes will be identified based on similarities to known angiogenic protein or peptide encoding genes or to the discovered capability of such genes to encode proteins or peptides that promote angiogenesis. Sequence information for such genes and encoded polypeptides is readily obtainable from sequence databases such as GenBank or EMBL. Polynucleotides encoding these proteins can also be obtained from gene libraries, e.g., by using PCR or hybridization techniques routine in the art.

[0347] In some embodiments, the protein can be an inhibitor of a cytokine such as an IL-18 inhibitor. For example, the GSK antibody SGK-1070806 antibody, a null Cas9 to IL-18, a siRNA, miRNA, or an IL-18 binding protein (IL-18BP). IL-18BP is a soluble protein having a high affinity for IL-18 (Novick et al., 1999; as disclosed in WO 99/09063).

[0348] IL-18BP is not the extracellular domain of one of the known IL18 receptors, but a secreted, naturally circulating protein. It belongs to a novel family of secreted proteins, further including several Poxvirus-encoded proteins (Novick et al., 1999). Urinary as well as recombinant IL-18BP specifically bind IL-18 with a high affinity and modulate the biological affinity of IL-18. IL-18 binds with high affinity and signals through the IL-18 receptor (IL-18R), a heteromeric complex of alpha and beta chains encoded by the genes IL18R1 and IL18RAP, respectively (Torigoe K et al (1997) J Biol Chem; 272(41):25737-42). The bioactivity of IL-18 is negatively regulated by the IL18BP, a naturally occurring and highly specific inhibitor. This soluble protein forms a complex with free IL-18 preventing its interaction with the IL-18 receptor, thus neutralizing and inhibiting its biological activity (Dinarello C A (2000) Ann Rheum Dis; 59 Suppl 1:i17-20). IL-18BP is a constitutively secreted protein with high affinity binding to IL-18. Alternate mRNA splicing variants of IL-18BP result in four isoforms. The prominent ‘a’ isoform is present in the serum of healthy humans at 20-fold molar excess compared with IL-18 (Dinarello and Kaplanski (2005) Expert Rev Clin Immunol, 1(4), 619-632).

[0349] The IL-18BP gene was localized to the human chromosome 1 lq13, and no exon coding for a transmembrane domain was found in an 8.3 kb genomic sequence. Four splice variants or isoforms of IL-18BP generated by alternative mRNA splicing have been found in humans so far. They were designated IL-18BP a, b, c and d, all sharing the same N-terminus and differing in the C-terminus (Novick et al, 1999). These isoforms vary in their ability to bind IL-18. Of the four, hIL-18BP isoforms a and c are known to have a neutralizing capacity for IL-18. Human IL-18BP isoform binds to murine IL-18. The rAAV encodes IL-18 inhibitor as disclosed in WO2015032932 or US20140112915, or IL-18BP, as disclosed in WO1999009063 which is incorporated herein in its entirety.

[0350] In some embodiments, the rAAV vector can encode a beta-adrenergic signaling protein (beta-ASPs) (including beta-adrenergic receptors (beta-ARs), G-protein receptor kinase inhibitors (GRK inhibitors) and adenylylcyclases (ACs)) to enhance cardiac function as described and illustrated in detail in U.S. Pat. Application Ser. No. 08/924,757, filed Sep., 1997 (based on U.S. No. 60/048,933 filed Jun. 16, 1997 and U.S. Pat. No. 08/708,661 filed Sep., 1996), as well as PCT/US97/15610 filed Sep., 1997, and U.S. continuing case Ser. No. 09/008,097, filed Jan. 16, 1998, and U.S. continuing case Ser. No. 09/472,667, filed Dec. 27, 1999, each of which is incorporated by reference herein.

[0351] In some embodiments, rAAV vectors comprising cardiac-specific promoters as disclosed herein can be assessed using a myocardial infarction (MI) model as disclosed in Angeli et al., Comparative Medicine, 2009, 59(3), 272-279.

### B. Cardiac Specific Promoters (CSP)

[0352] In some embodiments, the rAAV vector comprises a nucleic acid encoding the therapeutic agent, e.g., inhibitor of PP1 or other agent, operatively linked to a cardiac-specific promoter. Exemplary cardiac specific promoters are disclosed in Table 2A, 2B, 3 and 4 herein. In some embodiments, the cardiac specific promoter is a synthetic cardiac specific promoter.

[0353] In some embodiments, to achieve appropriate levels of expression of the transgene, e.g., inhibitor of PP1 (e.g., I-1 or I-lc), the rAAV genotype comprises a cardiac specific promoter (CSP). A CSP enables expression of the operatively linked gene in the heart tissue, and can in some embodiments, be an inducible CSP. In an embodiment, a CSP is located upstream 5′ and is operatively linked to the heterologous nucleic acid sequence encoding the transgene, e.g., inhibitor of PP1 (e.g., I-1 or I-1c). Exemplary cardiac-specific promoters are disclosed herein, e.g., any selected from Tables 1 herein, or functional variants thereof. In some embodiments of the compositions and methods disclosed herein, a cardiac-specific promoter includes a cardiac-specific cis-regulatory element (CRE), a synthetic cardiac-specific cis-regulatory module (CRM) or a synthetic cardiac-specific promoter as disclosed in Tables 1-3.

[0354] In some embodiments, to achieve appropriate levels of expression of a PP1 inhibitor (e.g., I-1 or I-1c expression), the rAAV genotype comprises a cardiac specific promoter (CSP). A CSP enables expression of the operatively linked gene in the heart, and can in some embodiments, be and inducible CSP. In an embodiment, a CSP is located upstream 5′ and is operatively linked to the heterologous nucleic acid sequence encoding the PP1 inhibitor protein. Exemplary CSP are disclosed herein, and include for example, the CSP listed in Table 2A herein or functional variants thereof. In some embodiments of the compositions and methods disclosed herein, a cardiac-specific promoter includes a cardiac-specific cis-regulatory element (CRE), a synthetic cardiac-specific cis-regulatory module (CRM) or a synthetic cardiac-specific promoter that comprises elements of minimal cardiac-specific promoters or cardiac-specific proximal promoters.

### I. Cardiac-Specific Promoters

[0355] Table 2A shows nucleic acid sequences of exemplary cardiac-specific promoters for use in the methods and composition as disclosed herein.

TABLE 2A

| NAME | LENGTH | NAME | LENGTH |
|---|---|---|---|
| SP0067 (SEQ ID NO: 3) | 443 | SP0480 (SEQ ID NO: 22) | 496 |
| SP0075 (SEQ ID NO: 4) | 433 | SP0481 (SEQ ID NO: 23) | 456 |
| SP0424 (SEQ ID NO: 5) | 765 | SP0482 (SEQ ID NO: 24) | 517 |
| SP0425 (SEQ ID NO: 6) | 631 | SP0483 (SEQ ID NO: 25) | 453 |
| SP0429 (SEQ ID NO: 7) | 806 | SP0484 (SEQ ID NO: 26) | 348 |
| SP0430 (SEQ ID NO: 8) | 842 | SP0485 (SEQ ID NO: 27) | 442 |
| SP0344 (SEQ ID NO: 9) | 460 | SP0488 (SEQ ID NO: 28) | 463 |
| SP0433 (SEQ ID NO: 10) | 554 | SP0487 (SEQ ID NO: 29) | 337 |
| SP0435 (SEQ ID NO: 11) | 609 | SP0488 (SEQ ID NO: 30) | 544 |
| SP0436 (SEQ ID NO: 12) | 632 | SP0489 (SEQ ID NO: 31) | 553 |
| SP0449 (SEQ ID NO: 13) | 782 | SP0490 (SEQ ID NO: 32) | 497 |
| SP0450 (SEQ ID NO: 14) | 823 | SP0491 (SEQ ID NO: 33) | 478 |
| SP0451 (SEQ ID NO: 15) | 859 | SP0492 (SEQ ID NO: 34) | 378 |
| SP0452 (SEQ ID NO: 16) | 851 | SP0493(SEQ ID NO: 35) | 359 |
| SP0475 (SEQ ID NO: 17) | 647 | SP0494 (SEQ ID NO: 36) | 545 |
| SP0476 (SEQ ID NO: 18) | 501 | SP0495 (SEQ ID NO: 37) | 567 |
| SP0477 (SEQ ID NO: 19) | 484 | SP0496 (SEQ ID NO: 38) | 548 |
| SP0478 (SEQ ID NO: 20) | 465 | SP0448 (SEQ ID NO: 288) | 763 |
| SP0479 (SEQ ID NO: 21) | 456 | SP0434 (SEQ ID NO: 289) | 420 |

[0356] Aspects of the technology relate to a rAAV vector comprising a synthetic cardiac-specific promoter as disclosed in Table 2A. In some embodiments, the rAAV vector comprises a synthetic cardiac-specific promoter disclosed in Table 2A, which operatively linked to a nucleic acid encoding an inhibitor of PP1 as disclosed herein, or a gene as disclosed in Table 18A or 18B disclosed herein.

[0357] In some embodiments, the synthetic cardiac-specific promoter disclosed herein can comprise one or more cis-regulatory elements (CREs) and/or a minimal promoter or proximal promoters, and/or a regulatory element (RE) such as a 5′ UTR or intron, or RE that functions as both a 5′UTR and intron (e.g., CMV-IE), which are disclosed herein.

[0358] Table 2B: CRE and minimal/proximal promoters of the embodiments of cardiac-specific promoters of Table 2A.

| | | | | |
|---|---|---|---|---|
| Promoter | CRE | CRE | Minimal or proximal promoter | 5′Intron/UTR (if present) |
| SP0067 (SEQ ID NO: 3) | | CRE0033 (SEQ ID NO: 41) | SKM_18 (SEQ ID NO: 55) | |
| SP0075 (SEQ ID NO” SEQ ID NO: 4) | | CRE0033 (SEQ ID NO: 41) | SKM_20 (SEQ ID NO: 56) | |
| SP0424 (SEQ ID NO: 5) | | CRE0004 (SEQ ID NO: 39) | CRE0082 (SEQ ID NO: 57) | |
| SP0425 (SEQ ID NO: 6) | | CRE0028 (SEQ ID NO: 40) | CRE0082 (SEQ ID NO: 57) | |
| SP0429 (SEQ ID NO: 7) | | CRE0095 (SEQ ID NO: 44) | CRE0082 (SEQ ID NO: 57) | |
| SP0430 (SEQ ID NO: 8) | | CRE0096 (SEQ ID NO: 45) | CRE0082 (SEQ ID NO: 57) | |
| SP0344 (SEQ ID NO: 9) | | CRE0033 (SEQ ID NO: 41) | CRE0038 (SEQ ID NO: 64) | |
| SP0433 (SEQ ID NO: 10) | CRE0033 (SEQ ID NO: 41) | CRE0071.3 (SEQ ID NO:43) | CRE0070 (SEQ ID NO:42) | |
| SP0435 (SEQ ID NO: 11) | | CRE0033 (SEQ ID NO: 41) | CRE0082 (SEQ ID NO: 57) | |
| SP0436 (SEQ ID NO: 12) | CRE0033 (SEQ ID NO: 41) | CRE0033 (SEQ ID NO: 41) | SKM_18 (SEQ ID NO: 55) | |
| SP0449 (SEQ ID NO: 13) | CRE0004 (SEQ ID NO:39) | CRE0033 (SEQ ID NO: 41) | SKM_18 (SEQ ID NO: 55) | |
| SP0450 (SEQ ID NO: 14) | CRE0095 (SEQ ID NO: 44) | CRE0033 (SEQ ID NO: 41) | SKM_18 (SEQ ID NO: 55) | |
| SP0451 (SEQ ID NO: 15) | CRE0096 (SEQ ID NO: 45) | CRE0033 (SEQ ID NO: 41) | SKM_18 (SEQ ID NO: 55) | |
| SP0452 (SEQ ID NO: 16) | CRE0082 (SEQ ID NO:57) | CRE0033 (SEQ ID NO: 41) | SKM_18 (SEQ ID NO: 55) | |
| SP0475 (SEQ ID NO: 17) | | CRE0033 (SEQ ID NO: 41) | SKM_18 (SEQ ID NO: 55) | CMV-IE 5′UTR and intron (A SEQ ID NO: 65) |
| SP0476 (SEQ ID NO: 18) | | CRE0105 (SEQ ID NO: 46) | SKM_18 (SEQ ID NO: 55) | |
| SP0477 (SEQ ID NO: 19) | | CRE0106 (SEQ ID NO: 47) | SKM_18 (SEQ ID NO: 55) | |
| SP0478 (SEQ ID NO: 20) | | CRE0107 ((SEQ ID NO: 48) | SKM_18 (SEQ ID NO: 55) | |
| SP0479 (SEQ ID NO: 21) | | CRE0108 (SEQ ID NO:49) | SKM_18 (SEQ ID NO: 55) | |
| SP0480 (SEQ ID NO: 22) | | CRE0109 (SEQ ID NO:50) | SKM_18 (SEQ ID NO: 55) | |
| SP0481 (SEQ ID NO: 23) | | CRE0033 (SEQ ID NO: 41) | CRE0110 (SEQ ID NO: 59) | |
| SP0482 (SEQ ID NO: 24) | | CRE01 1 1 ((SEQ ID NO: 51) | SKM_18 (SEQ ID NO:55) | |
| SP0483 (SEQ ID NO: 25) | | CRE0033 (SEQ ID NO: 41) | CRE0112 (SEQ ID NO: 60) | |
| SP0484 (SEQ ID NO: 26) | | CRE0033 (SEQ ID NO: 41) | CRE0113 (SEQ ID NO: 61) | |
| SP0485 (SEQ ID NO: 27) | | CRE0114 (AU) | SKM_18 (SEQ ID NO: 55) | |
| SP0486 (SEQ ID NO: 28) | | CRE0033 (SEQ ID NO: 41) | CRE0115 (SEQ ID NO: 62) | |
| SP0487 (SEQ ID NO: 29) | | CRE0033 (SEQ ID NO: 41) | CRE0116 (SEQ ID NO: 63) | |
| SP0488 (SEQ ID NO: 30) | | CRE0117 (SEQ ID NO: 53) | SKM_18 (SEQ ID NO: 55) | |
| SP0489 (SEQ ID NO: 31) | | CRE0033 (SEQ ID NO: 41) | CRE0104 (SEQ ID NO: 58) | |
| SP0490 (SEQ ID NO: 32) | | CRE0106 (SEQ ID NO:47) | CRE0110 (SEQ ID NO: 59) | |
| SP0491 (SEQ ID NO: 33) | | CRE0107 (SEQ ID NO: 48) | CRE0110 (SEQ ID NO: 59) | |
| SP0492 (SEQ ID NO: 34) | | CRE0106 (SEQ ID NO: 47) | CRE0116 (SEQ ID NO: 63) | |
| SP0493 (SEQ ID NO: 35) | | CRE0107 (SEQ ID NO: 48) | CRE0116 (SEQ ID NO: 63) | |
| SP0494 (SEQ ID NO: 36) | | CRE0118 (SEQ ID NO: 54) | SKM_18 (SEQ ID NO: 55) | |
| SP0495 (SEQ ID NO: 37) | CRE0106 (SEQ ID NO: 47) | CRE0033 (SEQ ID NO: 41) | CRE0116 (SEQ ID NO: 63) | |
| SP0496 (SEQ ID NO: 38) | CRE0107 (SEQ ID NO: 48) | CRE0033 (SEQ ID NO: 41) | CRE0116 (SEQ ID NO: 63) | |

[0359] The CREs, CRMs, introns, UTRs, minimal/proximal promoters and promoters as disclosed herein can be active in various muscle tissues, particularly but not exclusively in skeletal muscle and/or cardiac muscle. CREs, CRMs, promoter elements or promoters which are active in at least one muscle tissue type or at least one muscle cell type may be referred to as ‘muscle-specific’. For ease, muscle-specific CREs, CRMs, promoter elements or promoters can be further subdivided in subtypes depending on whether the CREs, CRMs, promoter elements or promoters are predominantly active in skeletal or cardiac muscle.

[0360] In some embodiments the cis-regulatory elements and promoters of the present invention are skeletal muscle-specific. In some embodiments the cis-regulatory elements, CRMs, promoter elements and promoters of the present invention are active predominantly in skeletal muscle and less active or not active in cardiac muscle. These CREs, CRMs, promoter elements and promoters are called ‘skeletal muscle-specific’.

[0361] In some embodiments the cis-regulatory elements and promoters of the present invention are cardiac muscle-specific. In some embodiments the cis-regulatory elements, CRMs, promoter elements and promoters of the present invention are active predominantly in cardiac muscle and less active or not active in skeletal muscles. These CREs, CRMs, promoter elements and promoters are called ‘cardiac muscle-specific’.

[0362] In some embodiments, muscle-specific CREs, CRMs, promoter elements and promoters are active in both skeletal muscle and cardiac muscle. These CREs, CRMs, promoter elements and promoters may be preferred when promoter activity is required in both the skeletal muscle and the heart (in the cardiac muscles). In some embodiments, cardiac muscle-specific CREs, CRMs, promoter elements and promoters may be preferred. These CREs, CRMs, promoter elements and promoters may be preferred when promoter activity is required in the heart (in the cardiac muscles) with little or no activity in the skeletal muscles. Examples of synthetic cardiac muscle-specific promoters include SP0067, SP0075, SP0424, SP0425, SP0429, SP0430, SP0433, SP0436, SP0452, SP0344, SP0483, SP0496, SP0435, SP0449, SP0450, SP0451, SP0475, SP0476, SP0477, SP0478, SP0479, SP0480, SP0481, SP0482, SP0484, SP0485, SP0486, SP0487, SP0488, SP0489, SP0490, SP0491, SP0492, SP0493, SP0494 and SP0495. Examples of preferred synthetic cardiac muscle-specific promoters are SP0067, SP0433, SP0436, SP0452, SP0344 and SP0483.

[0363] The cardiac muscle-specific CREs, CRMs, promoter element and promoters of the present invention can be active in various cells of the heart. The predominant cell types in the heart are ventricular cardiomyocytes, atrial cardiomyocytes, cardiac fibroblasts, or endothelial cells (EC) in the heart, as well as peri-vascular cells and pacemaker cells. Additionally, the cardiac muscle-specific CREs, CRMs, promoter element and promoters of the present invention can be active in various regions of the heart, such as, for example, activity in any or all of the following heart regions: aortic arch arteries (AA); aorta; cardiomyocytes (CM); endothelial or endocardial cells (ECs); inferior caval vein (ICV); interventricular septum (IVS); left atrium (LA); left superior caval vein (LSCV); left ventricle (LV); outflow tract (OT); pulmonary arteries (PO); proepicardial organ (PEO); pulmonary vein (PV); right atrium (RA); right superior caval vein (RSCV); right ventricle (RV); superior caval vein (SCV); cardiac smooth muscle cells (SMs).

[0364] In some embodiments, muscle-specific CREs, CRMs, promoter elements and promoters which are active in both skeletal muscle and cardiac muscle are also encompassed for use in the AAVs for the methods of administration and treatment as disclosed herein. These CREs, CRMs, promoter elements and promoters may be preferred when promoter activity is required in both the skeletal muscle and the heart (in the cardiac muscles). Examples of muscle-specific promoters active in both skeletal and cardiac muscle include SP0010, SP0020, SP0033, SP0038, SP0040, SP0042, SP0051, SP0057, SP0058, SP0061, SP0062, SP0064, SP0065, SP0066, SP0068, SP0070, SP0071, SP0076, SP0132, SP0133, SP0134,SP0136, SP0146, SP0147, SP0148, SP0150, SP0153, SP0155, SP0156, SP0157, SP0158, SP0159, SP0160, SP0161, SP0162, SP0163, SP0164, SP0165, SP0166, SP0169, SP0170, SP0171, SP0173, SP0228, SP0229, SP0230, SP0231, SP0232, SP0257, SP0262, SP0264 SP0265, SP0266, SP0267, SP0268, SP0270, SP0271, SP0279, SP0286, SP0305, SP0306, SP0307, SP0309, SP0310, SP0311, SP0312, SP0313, SP0314, SP0315, SP0316, SP0320, SP0322, SP0323, SP0324, SP0325, SP0326, SP0327, SP0328, SP0329, SP0330, SP0331, SP0332, SP0333, SP0334, SP0335, SP0336, SP0337, SP0338, SP0339, SP0340, SP0341, SP0343, SP0345, SP0346, SP0347, SP0348, SP0349, SP0350, SP0351, SP0352, SP0353, SP0354, SP0355, SP0356, SP0358, SP0359, SP0361, SP0362, SP0363, SP0364, SP0365, SP0366, SP0367, SP0368, SP0369, SP0370, SP0371, SP0372, SP0373, SP0374, SP0375, SP0376, SP0377, SP0378, SP0379, SP0380, SP0381, SP0382, SKM_14, SKM_18, SKM_20, SP0357, SP0437-SP0445, SP0447 and SP0453-SP0471, 473-474. Examples of preferred synthetic muscle-specific promoters which are active in both skeletal and cardiac muscles are SP0057, SP0134, SP0173, SP0279, SP0286, SP0310, SP0316, SP0320 and SP0326.

### II. Functional Variants of the Cardiac Specific Promoters

[0365] In some embodiments, the promoter is a synthetic cardiac-specific promoter comprising a combination of the cis-regulatory elements (CREs), for example CRE0051 and CRE0042, or functional variants thereof. Typically, the CREs are operably linked to a promoter element. In some preferred embodiments, the cardiac-specific promoter comprises said CREs, or functional variants thereof, in the order recited, such as CRE0051, CRE0042, and then the promoter element (order is given in an upstream to downstream direction, as is conventional in the art). In some preferred embodiments, the cardiac-specific promoter comprises said CREs, or functional variants thereof, in a different order from that recited, such as CRE0042, CRE0051 and then the promoter element.

[0366] In some embodiments, the cardiac-specific promoter comprises said CREs, or functional variants thereof, in the order recited, such as CRE0033, and then any other CRE element, or the promoter element disclosed herein. For example, the promoter can comprise CRE0033 and at least one CRE, or at least 2 CREs, or at least 3 CREs, or at least 4 CREs or more than 4 CREs selected from any CRE disclosed in Tables 2B, 3, 5B or 6, as disclosed herein.

[0367] The promoter element can be any suitable proximal promoter or minimal promoter. In some embodiments, the promoter element is a minimal promoter. Where the promoter is a proximal promoter, it is generally preferred that the proximal promoter is cardiac-specific.

### SP0067 and Variants Thereof

[0368] In some embodiments, the promoter is a synthetic cardiac muscle-specific promoter comprising CRE0033 operably linked to a promoter element. In some preferred embodiments, the synthetic cardiac muscle-specific promoter comprises CRE0033 immediately upstream of the promoter element.

[0369] The promoter element can be any suitable proximal or minimal promoter. In some embodiments, the promoter element is a minimal promoter. Where the promoter is a proximal promoter, it is generally preferred that the proximal promoter is muscle- specific or cardiac muscle-specific.

[0370] In some preferred embodiments the promoter element is SKM_18 or functional variant thereof. SKM_18 is a muscle-specific proximal promoter. In some embodiments the cardiac muscle-specific promoter comprises the following elements (or functional variants thereof): CRE0033 and then SKM_18.

[0371] CRE0033 has the nucleic acid sequence of SEQ ID NO: 41: Functional variants of SEQ ID NO: 41 thereof may have a sequence that is at least 60%, 65%, 70%, 75%, 80%, 85%, 90%, 95%, 96%, 97%, 98%, or 99% identical thereto.

[0372] Functional variants of CRE0033 are regulatory elements with sequences which vary from CRE0033, but which substantially retain activity as muscle-specific CREs. It will be appreciated by the skilled person that it is possible to vary the sequence of a CRE while retaining its ability to bind to the requisite transcription factors (TFs) and enhance expression. A functional variant can comprise substitutions, deletions and/or insertions compared to a reference CRE, provided they do not render the CRE substantially non-functional.

[0373] In some embodiments, a functional variant of CRE0033 can be viewed as a CRE which, when substituted in place of CRE0033 in a promoter, substantially retains its activity. For example, a cardiac muscle-specific promoter which comprises a functional variant of CRE0033 substituted in place of CRE0033 preferably retains 80% of its activity, more preferably 90% of its activity, more preferably 95% of its activity, and yet more preferably 100% of its activity. For example, considering promoter SP0067 as an example, CRE0033 in SP0067 can be replaced with a functional variant of CRE0033, and the promoter substantially retains its activity. Retention of activity can be assessed by comparing expression of a suitable reporter under the control of the reference promoter with an otherwise identical promoter comprising the substituted CRE under equivalent conditions.

[0374] It will be noted that the CRE0033 or functional variant thereof can be provided on either strand of a double stranded polynucleotide and can be provided in either orientation. As such, complementary and reverse complementary sequences of SEQ ID NO: 41 or a functional variant thereof fall within the scope of the invention. Single stranded nucleic acids comprising the sequence according to SEQ ID NO: 41 or a functional variant thereof also fall within the scope of the invention.

[0375] In some embodiments, the CRE033 or a functional variant thereof, has a length of 200 or fewer nucleotides, 150 or fewer nucleotides, 125 or fewer nucleotides, or 100 or fewer nucleotides.

[0376] SKM_18 has the nucleic acid sequence of SEQ ID NO: 55. Functional variants of SEQ ID NO: 51 may have a sequence that is at least 60%, 65%, 70%, 75%, 80%, 85%, 90%, 95%, 96%, 97%, 98%, or 99% identical thereto.

[0377] As discussed above, functional variants of SKM_18 substantially retain the ability of SKM_18 to act as a muscle-specific promoter element. For example, when a functional variant of SKM_18 is substituted into cardiac muscle-specific promoter SP0067, the modified promoter retains at least 80% of its activity, more preferably at least 90% of its activity, more preferably at least 95% of its activity, and yet more preferably 100% of the activity of SP0067. Suitably the functional variant of SKM_18 comprises a sequence which has at least 70%, 80%, 90%, 95% or 99% identity to SEQ ID NO: 55.

[0378] In some preferred embodiments, a promoter element comprising or consisting of SKM_18 or a functional variant thereof has a length of 300 or fewer nucleotides, 250 or fewer nucleotides, 200 or fewer nucleotides, 150 or fewer nucleotides, 125 or fewer nucleotides, 110 or fewer nucleotides, or 95 or fewer nucleotides.

[0379] In some embodiments the cardiac muscle-specific promoter comprises SEQ ID NO: 3, or a functional variant thereof. In some embodiments, functional variants may have a sequence that is at least 60%, 65%, 70%, 75%, 80%, 85%, 90%, 95%, 96%, 97%, 98%, or 99% identical thereto. The promoter having a sequence according to SEQ ID NO: 3 is referred to as SP0067. The SP0067 promoter is particularly preferred in some embodiments. This promoter has been found to be very specific for cardiac muscle and is also very short, which is advantageous in some circumstances.

### SP0075 and Variants Thereof

[0380] In some embodiments, the promoter is a synthetic cardiac muscle-specific promoter comprising CRE0033 operably linked to a promoter element. In some preferred embodiments, the synthetic cardiac muscle-specific promoter comprises CRE0033 immediately upstream of the promoter element.

[0381] The promoter element can be any suitable proximal or minimal promoter. In some embodiments, the promoter element is a minimal promoter. Where the promoter is a proximal promoter, it is generally preferred that the proximal promoter is muscle- specific or cardiac muscle-specific.

[0382] In some preferred embodiments the promoter element is SKM_20 or functional variant thereof. SKM_20 is a muscle-specific proximal promoter.

[0383] In some embodiments the cardiac muscle-specific promoter comprises the following elements (or functional variants thereof): CRE0033 and then SKM_20.

[0384] The sequence of CRE0033 and variants thereof are set out above.

[0385] SKM_20 has the nucleic acid sequence of SEQ ID NO: 56. Functional variants of SEQ ID NO: 56 may have a sequence that is at least 60%, 65%, 70%, 75%, 80%, 85%, 90%, 95%, 96%, 97%, 98%, or 99% identical thereto.

[0386] As discussed above, functional variants of SKM_20 substantially retain the ability of SKM_20 to act as a muscle-specific promoter element. For example, when a functional variant of SKM_20 is substituted into cardiac muscle-specific promoter SP0075, the modified promoter retains at least 80% of its activity, more preferably at least 90% of its activity, more preferably at least 95% of its activity, and yet more preferably 100% of the activity of SP0075. Suitably the functional variant of SKM_20 comprises a sequence which has at least 70%, 80%, 90%, 95% or 99% identity to SEQ ID NO: 56.

[0387] In some preferred embodiments, a promoter element comprising or consisting of SKM_20 or a functional variant thereof has a length of 300 or fewer nucleotides, 250 or fewer nucleotides, 200 or fewer nucleotides, 150 or fewer nucleotides, 125 or fewer nucleotides, 110 or fewer nucleotides, or 95 or fewer nucleotides.

[0388] In some embodiments the cardiac muscle-specific promoter comprises SEQ ID NO: 4, or a functional variant thereof. In some embodiments, functional variants may have a sequence that is at least 60%, 65%, 70%, 75%, 80%, 85%, 90%, 95%, 96%, 97%, 98%, or 99% identical thereto. The promoter having a sequence according to SEQ ID NO: 4 is referred to as SP0075. The SP0075 promoter is particularly preferred in some embodiments. This promoter has been found to be very specific for cardiac muscle and is also very short, which is advantageous in some circumstances.

### SP0424 and Variants Thereof

[0389] In some embodiments, the promoter is a synthetic cardiac muscle-specific promoter comprising CRE0004 operably linked to a promoter element. In some preferred embodiments, the synthetic cardiac muscle-specific promoter comprises CRE0004 immediately upstream of the promoter element.

[0390] The promoter element can be any suitable proximal or minimal promoter. In some embodiments, the promoter element is a minimal promoter. Where the promoter is a proximal promoter, it is generally preferred that the proximal promoter is muscle- specific or cardiac muscle-specific.

[0391] In some preferred embodiments the promoter element is CRE0082 or functional variant thereof. CRE0082 is a cardiac muscle-specific proximal promoter.

[0392] In some embodiments the cardiac muscle-specific promoter comprises the following elements (or functional variants thereof): CRE0004 and then CRE0082.

[0393] CRE0004 has the nucleic acid sequence of SEQ ID NO: 39. Functional variants of SEQ ID NO: 39 may have a sequence that is at least 60%, 65%, 70%, 75%, 80%, 85%, 90%, 95%, 96%, 97%, 98%, or 99% identical thereto.

[0394] Functional variants of CRE0004 are regulatory elements with sequences which vary from CRE0004, but which substantially retain activity as cardiac muscle-specific CREs. It will be appreciated by the skilled person that it is possible to vary the sequence of a CRE while retaining its ability to bind to the requisite transcription factors (TFs) and enhance expression. A functional variant can comprise substitutions, deletions and/or insertions compared to a reference CRE, provided they do not render the CRE substantially non-functional.

[0395] In some embodiments, a functional variant of CRE0004 can be viewed as a CRE which, when substituted in place of CRE0004 in a promoter, substantially retains its activity. For example, a cardiac muscle-specific promoter which comprises a functional variant of CRE0004 substituted in place of CRE0004 preferably retains 80% of its activity, more preferably 90% of its activity, more preferably 95% of its activity, and yet more preferably 100% of its activity. For example, considering promoter SP0424 as an example, CRE0004 in SP00424 can be replaced with a functional variant of CRE0004, and the promoter substantially retains its activity. Retention of activity can be assessed by comparing expression of a suitable reporter under the control of the reference promoter with an otherwise identical promoter comprising the substituted CRE under equivalent conditions.

[0396] It will be noted that the CRE0004 or functional variant thereof can be provided on either strand of a double stranded polynucleotide and can be provided in either orientation. As such, complementary and reverse complementary sequences of SEQ ID NO: 39 or a functional variant thereof fall within the scope of the invention. Single stranded nucleic acids comprising the sequence according to SEQ ID NO: 39 or a functional variant thereof also fall within the scope of the invention.

[0397] In some embodiments, the CRE004 or a functional variant thereof, has a length of 300 or fewer nucleotides, 200 or fewer nucleotides, 150 or fewer nucleotides, 125 or fewer nucleotides, or 100 or fewer nucleotides.

[0398] CRE0082 has the nucleic acid sequence of SEQ ID NO: 57. Functional variants of SEQ ID NO: 57 may have a sequence that is at least 60%, 65%, 70%, 75%, 80%, 85%, 90%, 95%, 96%, 97%, 98%, or 99% identical thereto.

[0399] As discussed above, functional variants of CRE0082 substantially retain the ability of CRE0082 to act as a cardiac muscle-specific promoter element. For example, when a functional variant of CRE0082 is substituted into cardiac muscle-specific promoter SP0424, the modified promoter retains at least 80% of its activity, more preferably at least 90% of its activity, more preferably at least 95% of its activity, and yet more preferably 100% of the activity of SP0424. Suitably the functional variant of CRE0082 comprises a sequence which has at least 70%, 80%, 90%, 95% or 99% identity to SEQ ID NO: 57.

[0400] In some preferred embodiments, a promoter element comprising or consisting of CRE0082 or a functional variant thereof has a length of 500 or fewer, 400 or fewer, 300 or fewer nucleotides, 250 or fewer nucleotides, 200 or fewer nucleotides, 150 or fewer nucleotides, 125 or fewer nucleotides, 110 or fewer nucleotides, or 95 or fewer nucleotides.

[0401] In some embodiments the cardiac muscle-specific promoter comprises SEQ ID NO: 5, or a functional variant thereof. In some embodiments, functional variants may have a sequence that is at least 60%, 65%, 70%, 75%, 80%, 85%, 90%, 95%, 96%, 97%, 98%, or 99% identical thereto. The promoter having a sequence according to SEQ ID NO: 5 is referred to as SP0424. The SP0424 promoter is particularly preferred in some embodiments. This promoter has been found to be specific for cardiac muscle, which is advantageous in some circumstances.

### SP0425 and Variants Thereof

[0402] In some embodiments, the promoter is a synthetic cardiac muscle-specific promoter comprising CRE0028 operably linked to a promoter element. In some preferred embodiments, the synthetic cardiac muscle-specific promoter comprises CRE0028 immediately upstream of the promoter element.

[0403] The promoter element can be any suitable proximal or minimal promoter. In some embodiments, the promoter element is a minimal promoter. Where the promoter is a proximal promoter, it is generally preferred that the proximal promoter is muscle- specific or cardiac muscle-specific.

[0404] In some preferred embodiments the promoter element is CRE0082 or functional variant thereof. CRE0082 is a cardiac muscle-specific proximal promoter.

[0405] In some embodiments the cardiac muscle-specific promoter comprises the following elements (or functional variants thereof): CRE0028 and then CRE0082.

[0406] CRE0028 has the nucleic acid sequence of SEQ ID NO: 40. Functional variants of SEQ ID NO: 40 may have a sequence that is at least 60%, 65%, 70%, 75%, 80%, 85%, 90%, 95%, 96%, 97%, 98%, or 99% identical thereto.

[0407] Functional variants of CRE0028 are regulatory elements with sequences which vary from CRE0028, but which substantially retain activity as cardiac muscle-specific CREs. It will be appreciated by the skilled person that it is possible to vary the sequence of a CRE while retaining its ability to bind to the requisite transcription factors (TFs) and enhance expression. A functional variant can comprise substitutions, deletions and/or insertions compared to a reference CRE, provided they do not render the CRE substantially non-functional.

[0408] In some embodiments, a functional variant of CRE0028 can be viewed as a CRE which, when substituted in place of CRE0028 in a promoter, substantially retains its activity. For example, a cardiac muscle-specific promoter which comprises a functional variant of CRE0028 substituted in place of CRE0028 preferably retains 80% of its activity, more preferably 90% of its activity, more preferably 95% of its activity, and yet more preferably 100% of its activity. For example, considering promoter SP0425 as an example, CRE0028 in SP00425 can be replaced with a functional variant of CRE0028, and the promoter substantially retains its activity. Retention of activity can be assessed by comparing expression of a suitable reporter under the control of the reference promoter with an otherwise identical promoter comprising the substituted CRE under equivalent conditions.

[0409] It will be noted that the CRE0028 or functional variant thereof can be provided on either strand of a double stranded polynucleotide and can be provided in either orientation. As such, complementary and reverse complementary sequences of SEQ ID NO: 40 or a functional variant thereof fall within the scope of the invention. Single stranded nucleic acids comprising the sequence according to SEQ ID NO: 40 or a functional variant thereof also fall within the scope of the invention.

[0410] In some embodiments, the CRE0028 or a functional variant thereof, has a length of 300 or fewer nucleotides, 200 or fewer nucleotides, 150 or fewer nucleotides, 125 or fewer nucleotides, or 100 or fewer nucleotides. The sequence of CRE0082 and variants thereof are set out above.

[0411] In some embodiments the cardiac muscle-specific promoter comprises the nucleic acid sequence of SEQ ID NO: 6, or a functional variant thereof. In some embodiments, functional variants of SEQ ID NO: 6 may have a sequence that is at least 60%, 65%, 70%, 75%, 80%, 85%, 90%, 95%, 96%, 97%, 98%, or 99% identical thereto. The promoter having a sequence according to SEQ ID NO: 6 is referred to as SP0425. The SP0425 promoter is particularly preferred in some embodiments. This promoter has been found to be specific for cardiac muscle, which is advantageous in some circumstances.

### SP0429 and Variants Thereof

[0412] In some embodiments, the promoter is a synthetic cardiac muscle-specific promoter comprising CRE0095 operably linked to a promoter element. In some preferred embodiments, the synthetic cardiac muscle-specific promoter comprises CRE0095 immediately upstream of the promoter element.

[0413] The promoter element can be any suitable proximal or minimal promoter. In some embodiments, the promoter element is a minimal promoter. Where the promoter is a proximal promoter, it is generally preferred that the proximal promoter is muscle- specific or cardiac muscle-specific.

[0414] In some preferred embodiments the promoter element is CRE0082 or functional variant thereof. CRE0082 is a cardiac muscle-specific proximal promoter.

[0415] In some embodiments the cardiac muscle-specific promoter comprises the following elements (or functional variants thereof): CRE0095 and then CRE0082.

[0416] CRE0095 has the nucleic acid sequence of SEQ ID NO: 44. Functional variants of SEQ ID NO: 44 may have a sequence that is at least 60%, 65%, 70%, 75%, 80%, 85%, 90%, 95%, 96%, 97%, 98%, or 99% identical thereto.

[0417] Functional variants of CRE0095 are regulatory elements with sequences which vary from CRE0095, but which substantially retain activity as cardiac muscle-specific CREs. It will be appreciated by the skilled person that it is possible to vary the sequence of a CRE while retaining its ability to bind to the requisite transcription factors (TFs) and enhance expression. A functional variant can comprise substitutions, deletions and/or insertions compared to a reference CRE, provided they do not render the CRE substantially non-functional.

[0418] In some embodiments, a functional variant of CRE0095 can be viewed as a CRE which, when substituted in place of CRE0095 in a promoter, substantially retains its activity. For example, a cardiac muscle-specific promoter which comprises a functional variant of CRE0095 substituted in place of CRE0095 preferably retains 80% of its activity, more preferably 90% of its activity, more preferably 95% of its activity, and yet more preferably 100% of its activity. For example, considering promoter SP0429 as an example, CRE0095 in SP0429 can be replaced with a functional variant of CRE0095, and the promoter substantially retains its activity. Retention of activity can be assessed by comparing expression of a suitable reporter under the control of the reference promoter with an otherwise identical promoter comprising the substituted CRE under equivalent conditions.

[0419] It will be noted that the CRE0095 or functional variant thereof can be provided on either strand of a double stranded polynucleotide and can be provided in either orientation. As such, complementary and reverse complementary sequences of SEQ ID NO: 44 or a functional variant thereof fall within the scope of the invention. Single stranded nucleic acids comprising the sequence according to SEQ ID NO: 44 or a functional variant thereof also fall within the scope of the invention.

[0420] In some embodiments, the CRE0095 or a functional variant thereof, has a length of 400 of fewer, 300 or fewer, 200 or fewer nucleotides, 150 or fewer nucleotides, 125 or fewer nucleotides, or 100 or fewer nucleotides.

[0421] The sequence of CRE0082 and variants thereof are set out above.

[0422] In some embodiments the cardiac muscle-specific promoter comprises the nucleic acid sequence of SEQ ID NO: 7, or a functional variant thereof. In some embodiments, functional variants of SEQ ID NO: 7 may have a sequence that is at least 60%, 65%, 70%, 75%, 80%, 85%, 90%, 95%, 96%, 97%, 98%, or 99% identical thereto. The promoter having a sequence according to SEQ ID NO: 7 is referred to as SP0429. The SP0429 promoter is particularly preferred in some embodiments. This promoter has been found to be specific for cardiac muscle, which is advantageous in some circumstances.

### SP0430 and Variants Thereof

[0423] In some embodiments, the promoter is a synthetic cardiac muscle-specific promoter comprising CRE0096 operably linked to a promoter element. In some preferred embodiments, the synthetic cardiac muscle-specific promoter comprises CRE0096 immediately upstream of the promoter element.

[0424] The promoter element can be any suitable proximal or minimal promoter. In some embodiments, the promoter element is a minimal promoter. Where the promoter is a proximal promoter, it is generally preferred that the proximal promoter is muscle- specific or cardiac muscle-specific.

[0425] In some preferred embodiments the promoter element is CRE0082 or functional variant thereof. CRE0082 is a cardiac muscle-specific proximal promoter.

[0426] In some embodiments the cardiac muscle-specific promoter comprises the following elements (or functional variants thereof): CRE0096 and then CRE0082.

[0427] CRE0096 has the nucleic acid sequence of SEQ ID NO: 45. Functional variants thereof may have a sequence that is at least 60%, 65%, 70%, 75%, 80%, 85%, 90%, 95%, 96%, 97%, 98%, or 99% identical thereto.

[0428] Functional variants of CRE0096 are regulatory elements with sequences which vary from CRE0096, but which substantially retain activity as cardiac muscle-specific CREs. It will be appreciated by the skilled person that it is possible to vary the sequence of a CRE while retaining its ability to bind to the requisite transcription factors (TFs) and enhance expression. A functional variant can comprise substitutions, deletions and/or insertions compared to a reference CRE, provided they do not render the CRE substantially non-functional.

[0429] In some embodiments, a functional variant of CRE0096 can be viewed as a CRE which, when substituted in place of CRE0096 in a promoter, substantially retains its activity. For example, a cardiac muscle-specific promoter which comprises a functional variant of CRE0096 substituted in place of CRE0096 preferably retains 80% of its activity, more preferably 90% of its activity, more preferably 95% of its activity, and yet more preferably 100% of its activity. For example, considering promoter SP0430 as an example, CRE0096 in SP0430 can be replaced with a functional variant of CRE0096, and the promoter substantially retains its activity. Retention of activity can be assessed by comparing expression of a suitable reporter under the control of the reference promoter with an otherwise identical promoter comprising the substituted CRE under equivalent conditions.

[0430] It will be noted that the CRE0096 or functional variant thereof can be provided on either strand of a double stranded polynucleotide and can be provided in either orientation. As such, complementary and reverse complementary sequences of SEQ ID NO: 45 or a functional variant thereof fall within the scope of the invention. Single stranded nucleic acids comprising the sequence according to SEQ ID NO: 45 or a functional variant thereof also fall within the scope of the invention.

[0431] In some embodiments, the CRE0096 or a functional variant thereof, has a length of 500 or fewer nucleotides, 400 or fewer nucleotides, 300 or fewer nucleotides, 200 or fewer nucleotides, 150 or fewer nucleotides, 125 or fewer nucleotides, or 100 or fewer nucleotides. The sequence of CRE0082 and variants thereof are set out above.

[0432] In some embodiments the cardiac muscle-specific promoter comprises the nucleic acid sequence of SEQ ID NO: 8, or a functional variant thereof. In some embodiments, functional variants of SEQ ID NO: 8 may have a sequence that is at least 60%, 65%, 70%, 75%, 80%, 85%, 90%, 95%, 96%, 97%, 98%, or 99% identical thereto. The promoter having a sequence according to SEQ ID NO: 8 is referred to as SP0430. The SP0430 promoter is particularly preferred in some embodiments. This promoter has been found to be specific for cardiac muscle, which is advantageous in some circumstances.

### SP0344 and Variants Thereof

[0433] In some embodiments, the promoter is a synthetic cardiac muscle-specific promoter comprising CRE0033 operably linked to a promoter element. In some preferred embodiments, the synthetic cardiac muscle-specific promoter comprises CRE0033 immediately upstream of the promoter element.

[0434] The promoter element can be any suitable proximal or minimal promoter. In some embodiments, the promoter element is a minimal promoter. Where the promoter is a proximal promoter, it is generally preferred that the proximal promoter is muscle- specific or cardiac muscle-specific.

[0435] In some preferred embodiments the promoter element is CRE0038 or functional variant thereof. CRE0038 is a cardiac muscle-specific proximal promoter.

[0436] In some embodiments the cardiac muscle-specific promoter comprises the following elements (or functional variants thereof): CRE0033 and then CRE0038.

[0437] The sequence of CRE0033 and variants thereof are set out above.

[0438] CRE0038 has the nucleic acid sequence of SEQ ID NO: 64. Functional variants of SEQ ID NO: 64 thereof may have a sequence that is at least 60%, 65%, 70%, 75%, 80%, 85%, 90%, 95%, 96%, 97%, 98%, or 99% identical thereto.

[0439] As discussed above, functional variants of CRE0038 substantially retain the ability of CRE0038 to act as a cardiac muscle-specific promoter element. For example, when a functional variant of CRE0038 is substituted into cardiac muscle-specific promoter SP0344, the modified promoter retains at least 80% of its activity, more preferably at least 90% of its activity, more preferably at least 95% of its activity, and yet more preferably 100% of the activity of SP0344. Suitably the functional variant of CRE0038 comprises a sequence which has at least 70%, 80%, 90%, 95% or 99% identity to SEQ ID NO: 64.

[0440] In some preferred embodiments, a promoter element comprising or consisting of CRE0038 or a functional variant thereof has a length of 300 or fewer nucleotides, 250 or fewer nucleotides, 200 or fewer nucleotides, 150 or fewer nucleotides, 125 or fewer nucleotides, 110 or fewer nucleotides, or 95 or fewer nucleotides.

[0441] In some embodiments the cardiac muscle-specific promoter comprises nucleic acid sequence of SEQ ID NO: 9, or a functional variant thereof. In some embodiments, functional variants of SEQ ID NO: 9 may have a sequence that is at least 60%, 65%, 70%, 75%, 80%, 85%, 90%, 95%, 96%, 97%, 98%, or 99% identical thereto. The promoter having a sequence according to SEQ ID NO: 9 is referred to as SP0344. The SP0344 promoter is particularly preferred in some embodiments. This promoter has been found to be specific for cardiac muscle, which is advantageous in some circumstances.

### SP0433 and Variants Thereof

[0442] In some embodiments, the promoter is a synthetic cardiac muscle-specific promoter comprising a combination of the cis-regulatory elements CRE0033 and CRE0071.3, or functional variants thereof. Typically, the CREs are operably linked to a promoter element. In some preferred embodiments, the cardiac muscle-specific promoter comprises said CREs, or functional variants thereof, in the order CRE0033, CRE0071.3, and then the promoter element (order is given in an upstream to downstream direction, as is conventional in the art). In some embodiments, the cardiac muscle-specific promoter comprises said CREs, or functional variants thereof, in the order CRE0071.3, CRE0033, and then the promoter element (order is given in an upstream to downstream direction, as is conventional in the art).

[0443] The promoter element can be any suitable proximal promoter or minimal promoter. In some embodiments, the promoter element is a minimal promoter. Where the promoter is a proximal promoter, it is generally preferred that the proximal promoter is cardiac muscle-specific or cardiac muscle-specific.

[0444] In some preferred embodiments, the promoter element is CRE0070, or a functional variant thereof. CRE0070 is a muscle-specific proximal promoter.

[0445] Thus, in one embodiment the promoter comprises the following regulatory elements: CRE0033, CRE0071. 3 and CRE0070, or functional variants thereof. The sequence of CRE0033 and variants thereof are set out above. CRE0071.3 has nucleic acid sequence of SEQ ID NO: 43. Functional variants of SEQ ID NO: 43 may have a sequence that is at least 60%, 65%, 70%, 75%, 80%, 85%, 90%, 95%, 96%, 97%, 98%, or 99% identical thereto.

[0446] Functional variants of CRE0071.3 are regulatory elements with sequences which vary from CRE0071.3, but which substantially retain activity as cardiac muscle-specific CREs. It will be appreciated by the skilled person that it is possible to vary the sequence of a CRE while retaining its ability to bind to the requisite transcription factors (TFs) and enhance expression. A functional variant can comprise substitutions, deletions and/or insertions compared to a reference CRE, provided they do not render the CRE substantially non-functional.

[0447] In some embodiments, a functional variant of CRE0071.3 can be viewed as a CRE which, when substituted in place of CRE0071.3 in a promoter, substantially retains its activity. For example, a cardiac muscle-specific promoter which comprises a functional variant of CRE0071.3 substituted in place of CRE0071.3 preferably retains 80% of its activity, more preferably 90% of its activity, more preferably 95% of its activity, and yet more preferably 100% of its activity. For example, considering promoter SP0433 as an example, CRE0071.3 in SP00433 can be replaced with a functional variant of CRE0071.3, and the promoter substantially retains its activity. Retention of activity can be assessed by comparing expression of a suitable reporter under the control of the reference promoter with an otherwise identical promoter comprising the substituted CRE under equivalent conditions.

[0448] It will be noted that the CRE0071.3 or functional variant thereof can be provided on either strand of a double stranded polynucleotide and can be provided in either orientation. As such, complementary and reverse complementary sequences of SEQ ID NO: 43 or a functional variant thereof fall within the scope of the invention. Single stranded nucleic acids comprising the sequence according to SEQ ID NO: 43 or a functional variant thereof also fall within the scope of the invention.

[0449] In some embodiments, the CRE0071.3 or a functional variant thereof, has a length of 300 or fewer, 200 or fewer nucleotides, 150 or fewer nucleotides, 125 or fewer nucleotides, or 100 or fewer nucleotides.

[0450] CRE0070 has the nucleic acid sequence of SEQ ID NO: 42. Functional variants of SEQ ID NO: 42 may have a sequence that is at least 60%, 65%, 70%, 75%, 80%, 85%, 90%, 95%, 96%, 97%, 98%, or 99% identical thereto.

[0451] As discussed above, functional variants of CRE0070 substantially retain the ability of CRE0070 to act as a muscle-specific promoter element. For example, when a functional variant of CRE0070 is substituted into cardiac muscle-specific promoter SP0433, the modified promoter retains at least 80% of its activity, more preferably at least 90% of its activity, more preferably at least 95% of its activity, and yet more preferably 100% of the activity of SP0433. Suitably the functional variant of CRE0070 comprises a sequence which has at least 70%, 80%, 90%, 95% or 99% identity to SEQ ID NO: 42.

[0452] In some preferred embodiments, a promoter element comprising or consisting of CRE0070 or a functional variant thereof has a length of 300 or fewer nucleotides, 250 or fewer nucleotides, 200 or fewer nucleotides, 150 or fewer nucleotides, 125 or fewer nucleotides, 110 or fewer nucleotides, or 95 or fewer nucleotides, 85 or fewer nucleotides, 75 or fewer nucleotides, 50 or fewer nucleotides.

[0453] In some embodiments the cardiac muscle-specific promoter comprises the nucleic acid sequence of SEQ ID NO: 10, or a functional variant thereof. In some embodiments, functional variants of SEQ ID NO: 10 may have a sequence that is at least 60%, 65%, 70%, 75%, 80%, 85%, 90%, 95%, 96%, 97%, 98%, or 99% identical thereto. The promoter having a sequence according to SEQ ID NO: 10 is referred to as SP0433. The SP0433 promoter is particularly preferred in some embodiments. This promoter has been found to be specific for cardiac muscle, which is advantageous in some circumstances.

[0454] In some embodiments, the promoter is a synthetic cardiac muscle-specific promoter comprising CRE0033 operably linked to a promoter element. In some preferred embodiments, the synthetic cardiac muscle-specific promoter comprises CRE0033 immediately upstream of the promoter element.

[0455] The promoter element can be any suitable proximal or minimal promoter. In some embodiments, the promoter element is a minimal promoter. Where the promoter is a proximal promoter, it is generally preferred that the proximal promoter is muscle- specific or cardiac muscle-specific.

[0456] In some preferred embodiments the promoter element is CRE0082 or functional variant thereof. CRE0082 is a cardiac muscle-specific proximal promoter.

[0457] In some embodiments the cardiac muscle-specific promoter comprises the following elements (or functional variants thereof): CRE0033 and then CRE0082. The sequence of CRE0033 and variants thereof are set out above. The sequence of CRE0082 and variants thereof are set out above.

### SP0435 and Variants Thereof

[0458] In some embodiments the cardiac muscle-specific promoter comprises the nucleic acid sequence of SEQ ID NO: 11, or a functional variant thereof. In some embodiments, functional variants of SEQ ID NO: 11 may have a sequence that is at least 60%, 65%, 70%, 75%, 80%, 85%, 90%, 95%, 96%, 97%, 98%, or 99% identical thereto. The promoter having a sequence according to SEQ ID NO: 11 is referred to as SP0435. The SP0435 promoter is particularly preferred in some embodiments. This promoter has been found to be specific for cardiac muscle, which is advantageous in some circumstances.

### SP0436 and Variants Thereof

[0459] In some embodiments, the promoter is a synthetic cardiac muscle-specific promoter comprising a combination of two cis-regulatory elements CRE0033, or functional variants thereof. Typically, the CREs are operably linked to a promoter element. In some preferred embodiments, the cardiac muscle-specific promoter comprises said CREs, or functional variants thereof, in the order first CRE0033, second CRE0033, and then the promoter element (order is given in an upstream to downstream direction, as is conventional in the art).

[0460] The promoter element can be any suitable proximal promoter or minimal promoter. In some embodiments, the promoter element is a minimal promoter. Where the promoter is a proximal promoter, it is generally preferred that the proximal promoter is muscle-specific or cardiac muscle-specific.

[0461] In some preferred embodiments, the promoter element is SKM_18, or a functional variant thereof. SKM_18 is a muscle-specific proximal promoter.

[0462] Thus, in one embodiment the promoter comprises the following regulatory elements: a first CRE0033, a second CRE0033 and SKM_18, or functional variants thereof.

[0463] A synthetic promoter comprising a two identical CREs is predicted to have higher expression it its target tissue or cells than an equivalent promoter which comprises only one of the identical CREs. For example, promoter SP0436 which comprises a first CRE0033, a second CRE0033 and SKM_18 has higher expression in cardiac muscle cells than promoter SP0067 which comprises only CRE0033 and SKM_18.

[0464] The sequence of CRE0033 and variants thereof are set out above.

[0465] The sequence of SKM_18 and variants thereof are set out above.

[0466] In some embodiments the cardiac muscle-specific promoter comprises the nucleic acid sequence of SEQ ID NO: 12, or a functional variant thereof. In some embodiments, functional variants of SEQ ID NO: 12 may have a sequence that is at least 60%, 65%, 70%, 75%, 80%, 85%, 90%, 95%, 96%, 97%, 98%, or 99% identical thereto. The promoter having a sequence according to SEQ ID NO: 12 is referred to as SP0436. The SP0436 promoter is particularly preferred in some embodiments. This promoter has been found to be specific for cardiac muscle, which is advantageous in some circumstances.

### SP0449 and Variants Thereof

[0467] In some embodiments, the promoter is a synthetic cardiac muscle-specific promoter comprising a combination of the cis-regulatory elements CRE0004 and CRE0033, or functional variants thereof. Typically the CREs are operably linked to a promoter element. In some preferred embodiments, the cardiac muscle-specific promoter comprises said CREs, or functional variants thereof, in the order CRE0004, CRE0033, and then the promoter element (order is given in an upstream to downstream direction, as is conventional in the art). In some preferred embodiments, the cardiac muscle-specific promoter comprises said CREs, or functional variants thereof, in the order CRE0033, CRE0004, and then the promoter element (order is given in an upstream to downstream direction, as is conventional in the art).

[0468] The promoter element can be any suitable proximal promoter or minimal promoter. In some embodiments, the promoter element is a minimal promoter. Where the promoter is a proximal promoter, it is generally preferred that the proximal promoter is muscle-specific or cardiac muscle-specific.

[0469] In some preferred embodiments, the promoter element is SKM_18, or a functional variant thereof. SKM_18 is a muscle-specific proximal promoter.

[0470] Thus, in one embodiment the promoter comprises the following regulatory elements: CRE0004, CRE0033 and SKM_18, or functional variants thereof.

[0471] The sequence of CRE0004 and variants thereof are set out above.

[0472] The sequence of CRE0033 and variants thereof are set out above.

[0473] The sequence of SKM_18 and variants thereof are set out above.

[0474] In some embodiments the cardiac muscle-specific promoter comprises the nucleic acid sequence of SEQ ID NO: 13, or a functional variant thereof. In some embodiments, functional variants of SEQ ID NO: 13 may have a sequence that is at least 60%, 65%, 70%, 75%, 80%, 85%, 90%, 95%, 96%, 97%, 98%, or 99% identical thereto. The promoter having a sequence according to SEQ ID NO: 13 is referred to as SP0449. The SP0449 promoter is particularly preferred in some embodiments. This promoter is predicted to be specific for cardiac muscle, which is advantageous in some circumstances.

### SP0450 and Variants Thereof

[0475] In some embodiments, the promoter is a synthetic cardiac muscle-specific promoter comprising a combination of the cis-regulatory elements CRE0095 and CRE0033, or functional variants thereof. Typically the CREs are operably linked to a promoter element. In some preferred embodiments, the cardiac muscle-specific promoter comprises said CREs, or functional variants thereof, in the order CRE0095, CRE0033, and then the promoter element (order is given in an upstream to downstream direction, as is conventional in the art). In some preferred embodiments, the cardiac muscle-specific promoter comprises said CREs, or functional variants thereof, in the order CRE0033, CRE0095, and then the promoter element (order is given in an upstream to downstream direction, as is conventional in the art).

[0476] The promoter element can be any suitable proximal promoter or minimal promoter. In some embodiments, the promoter element is a minimal promoter. Where the promoter is a proximal promoter, it is generally preferred that the proximal promoter is muscle-specific or cardiac muscle-specific.

[0477] In some preferred embodiments, the promoter element is SKM_18, or a functional variant thereof. SKM_18 is a muscle-specific proximal promoter.

[0478] Thus, in one embodiment the promoter comprises the following regulatory elements: CRE0095, CRE0033 and SKM_18, or functional variants thereof.

[0479] The sequence of CRE0095 and variants thereof are set out above.

[0480] The sequence of CRE0033 and variants thereof are set out above.

[0481] The sequence of SKM_18 and variants thereof are set out above.

[0482] In some embodiments the cardiac muscle-specific promoter comprises the nucleic acid sequence of SEQ ID NO: 14, or a functional variant thereof. In some embodiments, functional variants of SEQ ID NO: 14 may have a sequence that is at least 60%, 65%, 70%, 75%, 80%, 85%, 90%, 95%, 96%, 97%, 98%, or 99% identical thereto. The promoter having a sequence according to SEQ ID NO: 14 is referred to as SP0450. The SP0450 promoter is particularly preferred in some embodiments. This promoter is predicted to be specific for cardiac muscle, which is advantageous in some circumstances.

### SP0451 and Variants Thereof

[0483] In some embodiments, the promoter is a synthetic cardiac muscle-specific promoter comprising a combination of the cis-regulatory elements CRE0096 and CRE0033, or functional variants thereof. Typically the CREs are operably linked to a promoter element. In some preferred embodiments, the cardiac muscle-specific promoter comprises said CREs, or functional variants thereof, in the order CRE0096, CRE0033, and then the promoter element (order is given in an upstream to downstream direction, as is conventional in the art). In some preferred embodiments, the cardiac muscle-specific promoter comprises said CREs, or functional variants thereof, in the order CRE0033, CRE0096, and then the promoter element (order is given in an upstream to downstream direction, as is conventional in the art).

[0484] The promoter element can be any suitable proximal promoter or minimal promoter. In some embodiments, the promoter element is a minimal promoter. Where the promoter is a proximal promoter, it is generally preferred that the proximal promoter is muscle-specific or cardiac muscle-specific.

[0485] In some preferred embodiments, the promoter element is SKM_18, or a functional variant thereof. SKM_18 is a muscle-specific proximal promoter.

[0486] Thus, in one embodiment the promoter comprises the following regulatory elements: CRE0096, CRE0033 and SKM_18, or functional variants thereof.

[0487] The sequence of CRE0096 and variants thereof are set out above. The sequence of CRE0033 and variants thereof are set out above. The sequence of SKM_18 and variants thereof are set out above.

[0488] In some embodiments the cardiac muscle-specific promoter comprises the nucleic acid sequence of SEQ ID NO: 15, or a functional variant thereof. In some embodiments, functional variants of SEQ ID NO: 15 may have a sequence that is at least 60%, 65%, 70%, 75%, 80%, 85%, 90%, 95%, 96%, 97%, 98%, or 99% identical thereto. The promoter having a sequence according to SEQ ID NO: 15 is referred to as SP0451. The SP0451 promoter is particularly preferred in some embodiments. This promoter is predicted to be specific for cardiac muscle, which is advantageous in some circumstances.

### SP0452 and Variants Thereof

[0489] In some embodiments, the promoter is a synthetic cardiac muscle-specific promoter comprising a combination of the cardiac muscle-specific proximal promoter CRE0082 and cis-regulatory elements CRE0033, or functional variants thereof. Typically cardiac muscle-specific proximal promoter CRE0082 and cis-regulatory elements CRE0033 are operably linked to a further promoter element. In some preferred embodiments, the cardiac muscle-specific promoter comprises said proximal promoter and CRE, or functional variants thereof, in the order CRE0082, CRE0033, and then the further promoter element (order is given in an upstream to downstream direction, as is conventional in the art).

[0490] The further promoter element can be any suitable proximal promoter or minimal promoter. In some embodiments, the further promoter element is a minimal promoter. Where the promoter is a proximal promoter, it is generally preferred that the proximal promoter is muscle-specific or cardiac muscle-specific.

[0491] In some preferred embodiments, the further promoter element is SKM_18, or a functional variant thereof. SKM_18 is a muscle-specific proximal promoter.

[0492] Thus, in one embodiment the promoter comprises the following regulatory elements: CRE0082, CRE0033 and SKM_18, or functional variants thereof. This promoter comprises two proximal promoters used in tandem.

[0493] The sequence of CRE0082 and variants thereof are set out above. The sequence of CRE0033 and variants thereof are set out above. The sequence of SKM_18 and variants thereof are set out above.

[0494] In some embodiments the cardiac muscle-specific promoter comprises the nucleic acid sequence of SEQ ID NO: 16, or a functional variant thereof. In some embodiments, functional variants of SEQ ID NO: 16 may have a sequence that is at least 60%, 65%, 70%, 75%, 80%, 85%, 90%, 95%, 96%, 97%, 98%, or 99% identical thereto. The promoter having a sequence according to SEQ ID NO: 16 is referred to as SP0452. The SP0452 promoter is particularly preferred in some embodiments. This promoter is predicted to be specific for cardiac muscle, which is advantageous in some circumstances.

### SP0475 and Variants Thereof

[0495] In some embodiments, the promoter is a synthetic cardiac muscle-specific promoter comprising CRE0033 operably linked to a promoter element and a regulatory element such as a 5′UTR and/or an intron. In some preferred embodiments, the synthetic cardiac muscle-specific promoter comprises CRE0033 immediately upstream of the promoter element followed by the regulatory element such as a 5′UTR and/or an intron.

[0496] The promoter element can be any suitable proximal or minimal promoter. In some embodiments, the promoter element is a minimal promoter. Where the promoter is a proximal promoter, it is generally preferred that the proximal promoter is muscle- specific or cardiac muscle-specific.

[0497] In some preferred embodiments the promoter element is SKM_18 or functional variant thereof. SKM_18 is a muscle-specific proximal promoter.

[0498] The intron may be any suitable intron. The 5′UTR may be any suitable 5′UTR. A regulatory element may comprise an intron and a 5′UTR. In some preferred embodiments, the regulatory element is the CMV-IE 5′ UTR and intron

[0499] In some embodiments the cardiac muscle-specific promoter comprises the following elements (or functional variants thereof): CRE0033 followed by SKM_18 and then CMV-IE 5′UTR and intron.

[0500] The sequence of CRE0033 and variants thereof are set out above. The sequence of SKM_18 and variants thereof are set out above.

[0501] CMV-IE 5′UTR and intron has the nucleic acid sequence of SEQ ID NO: 65. Functional variants of SEQ ID NO: 65 may have a sequence that is at least 60%, 65%, 70%, 75%, 80%, 85%, 90%, 95%, 96%, 97%, 98%, or 99% identical thereto.

[0502] In some embodiments, a functional variant of CMV-IE 5′UTR and intron can be viewed as an intron which, when substituted in place of the CMV-IE 5′UTR and intron in a promoter, substantially retains its activity. For example, a cardiac muscle-specific promoter which comprises a functional variant of CMV-IE 5′ UTR and intron substituted in place of CMV-IE 5′UTR and intron preferably retains 80% of its activity, more preferably 90% of its activity, more preferably 95% of its activity, and yet more preferably 100% of its activity. For example, considering promoter SP0475 as an example, CMV-IE 5′ UTR and intron in SP0475 can be replaced with a functional variant of CMV-IE 5′UTR and intron, and the promoter substantially retains its activity. Retention of activity can be assessed by comparing expression of a suitable reporter under the control of the reference promoter with an otherwise identical promoter comprising the substituted intron under equivalent conditions.

[0503] A synthetic promoter comprising an intron such as the CMV-IE 5′ UTR and intron is predicted to have higher expression it its target tissue or cells than an equivalent promoter which does not comprise the intron. For example, promoter SP0475 which comprises CRE0033, SKM_18 and CMV-IE 5′UTR and intron is predicted to have higher expression in cardiac muscle tissue or cells than promoter SP0067 which only comprises CRE0033 and SKM_18.

[0504] In some embodiments the cardiac muscle-specific promoter comprises the nucleic acid sequence of SEQ ID NO: 17, or a functional variant thereof. In some embodiments, functional variants of SEQ ID NO: 17 may have a sequence that is at least 60%, 65%, 70%, 75%, 80%, 85%, 90%, 95%, 96%, 97%, 98%, or 99% identical thereto. The promoter having a sequence according to SEQ ID NO: 17 is referred to as SP0475. The SP0475 promoter is particularly preferred in some embodiments. This promoter is predicted to be specific for cardiac muscle, which is advantageous in some circumstances.

### SP0476 and Variants Thereof

[0505] In some embodiments, the promoter is a synthetic cardiac muscle-specific promoter comprising CRE0105 operably linked to a promoter element. In some preferred embodiments, the synthetic cardiac muscle-specific promoter comprises CRE0105 immediately upstream of the promoter element.

[0506] The promoter element can be any suitable proximal or minimal promoter. In some embodiments, the promoter element is a minimal promoter. Where the promoter is a proximal promoter, it is generally preferred that the proximal promoter is muscle- specific or cardiac muscle-specific.

[0507] In some preferred embodiments the promoter element is SKM_18 or functional variant thereof. SKM_18 is a muscle-specific proximal promoter. In some embodiments the cardiac muscle-specific promoter comprises the following elements (or functional variants thereof): CRE0105 and then SKM_18.

[0508] CRE0105 has the nucleic acid sequence of SEQ ID NO: 46. Functional variants of SEQ ID NO: 46 may have a sequence that is at least 60%, 65%, 70%, 75%, 80%, 85%, 90%, 95%, 96%, 97%, 98%, or 99% identical thereto.

[0509] Functional variants of CRE0105 are regulatory elements with sequences which vary from CRE0105, but which substantially retain activity as cardiac muscle-specific CREs. It will be appreciated by the skilled person that it is possible to vary the sequence of a CRE while retaining its ability to bind to the requisite transcription factors (TFs) and enhance expression. A functional variant can comprise substitutions, deletions and/or insertions compared to a reference CRE, provided they do not render the CRE substantially non-functional.

[0510] In some embodiments, a functional variant of CRE0105 can be viewed as a CRE which, when substituted in place of CRE0105 in a promoter, substantially retains its activity. For example, a cardiac muscle-specific promoter which comprises a functional variant of CRE0105 substituted in place of CRE0105 preferably retains 80% of its activity, more preferably 90% of its activity, more preferably 95% of its activity, and yet more preferably 100% of its activity. For example, considering promoter SP0476 as an example, CRE0105 in SP0476 can be replaced with a functional variant of CRE0105, and the promoter substantially retains its activity. Retention of activity can be assessed by comparing expression of a suitable reporter under the control of the reference promoter with an otherwise identical promoter comprising the substituted CRE under equivalent conditions.

[0511] It will be noted that the CRE0105 or functional variant thereof can be provided on either strand of a double stranded polynucleotide and can be provided in either orientation. As such, complementary and reverse complementary sequences of SEQ ID NO: 46 or a functional variant thereof fall within the scope of the invention. Single stranded nucleic acids comprising the sequence according to SEQ ID NO: 46 or a functional variant thereof also fall within the scope of the invention.

[0512] In some embodiments, the CRE0105 or a functional variant thereof, has a length of 300 or fewer nucleotides, 200 or fewer nucleotides, 150 or fewer nucleotides, 125 or fewer nucleotides, or 100 or fewer nucleotides.

[0513] The sequence of SKM_18 and variants thereof are set out above.

[0514] In some embodiments the cardiac muscle-specific promoter comprises the nucleic acid sequence of SEQ ID NO: 18, or a functional variant thereof. In some embodiments, functional variants of SEQ ID NO: 18 may have a sequence that is at least 60%, 65%, 70%, 75%, 80%, 85%, 90%, 95%, 96%, 97%, 98%, or 99% identical thereto. The promoter having a sequence according to SEQ ID NO: 18 is referred to as SP0476. The SP0476 promoter is particularly preferred in some embodiments. This promoter is predicted to be specific for cardiac muscle, which is advantageous in some circumstances.

### SP0477 and Variants Thereof

[0515] In some embodiments, the promoter is a synthetic cardiac muscle-specific promoter comprising CRE0106 operably linked to a promoter element. In some preferred embodiments, the synthetic cardiac muscle-specific promoter comprises CRE0106 immediately upstream of the promoter element.

[0516] The promoter element can be any suitable proximal or minimal promoter. In some embodiments, the promoter element is a minimal promoter. Where the promoter is a proximal promoter, it is generally preferred that the proximal promoter is muscle- specific or cardiac muscle-specific.

[0517] In some preferred embodiments the promoter element is SKM_18 or functional variant thereof. SKM_18 is a muscle-specific proximal promoter.

[0518] In some embodiments the cardiac muscle-specific promoter comprises the following elements (or functional variants thereof): CRE0106 and then SKM_18.

[0519] CRE0106 has the nucleic acid sequence of SEQ ID NO: 47. Functional variants of SEQ ID NO: 47 may have a sequence that is at least 60%, 65%, 70%, 75%, 80%, 85%, 90%, 95%, 96%, 97%, 98%, or 99% identical thereto.

[0520] Functional variants of CRE0106 are regulatory elements with sequences which vary from CRE0106, but which substantially retain activity as cardiac muscle-specific CREs. It will be appreciated by the skilled person that it is possible to vary the sequence of a CRE while retaining its ability to bind to the requisite transcription factors (TFs) and enhance expression. A functional variant can comprise substitutions, deletions and/or insertions compared to a reference CRE, provided they do not render the CRE substantially non-functional.

[0521] In some embodiments, a functional variant of CRE0106 can be viewed as a CRE which, when substituted in place of CRE0106 in a promoter, substantially retains its activity. For example, a cardiac muscle-specific promoter which comprises a functional variant of CRE0106 substituted in place of CRE0106 preferably retains 80% of its activity, more preferably 90% of its activity, more preferably 95% of its activity, and yet more preferably 100% of its activity. For example, considering promoter SP0477 as an example, CRE0106 in SP0477 can be replaced with a functional variant of CRE0106, and the promoter substantially retains its activity. Retention of activity can be assessed by comparing expression of a suitable reporter under the control of the reference promoter with an otherwise identical promoter comprising the substituted CRE under equivalent conditions.

[0522] It will be noted that the CRE0106 or functional variant thereof can be provided on either strand of a double stranded polynucleotide and can be provided in either orientation. As such, complementary and reverse complementary sequences of SEQ ID NO: 47 or a functional variant thereof fall within the scope of the invention. Single stranded nucleic acids comprising the sequence according to SEQ ID NO: 47 or a functional variant thereof also fall within the scope of the invention.

[0523] In some embodiments, the CRE0106 or a functional variant thereof, has a length of 300 or fewer nucleotides, 200 or fewer nucleotides, 150 or fewer nucleotides, 125 or fewer nucleotides, or 100 or fewer nucleotides. The sequence of SKM_18 and variants thereof are set out above.

[0524] In some embodiments the cardiac muscle-specific promoter comprises the nucleic acid sequence of SEQ ID NO: 19, or a functional variant thereof. In some embodiments, functional variants of SEQ ID NO: 19 may have a sequence that is at least 60%, 65%, 70%, 75%, 80%, 85%, 90%, 95%, 96%, 97%, 98%, or 99% identical thereto. The promoter having a sequence according to SEQ ID NO: 19 is referred to as SP0477. The SP0477 promoter is particularly preferred in some embodiments. This promoter is predicted to be specific for cardiac muscle, which is advantageous in some circumstances.

### SP0478 and Variants Thereof

[0525] In some embodiments, the promoter is a synthetic cardiac muscle-specific promoter comprising CRE0107 operably linked to a promoter element. In some preferred embodiments, the synthetic cardiac muscle-specific promoter comprises CRE0107 immediately upstream of the promoter element.

[0526] The promoter element can be any suitable proximal or minimal promoter. In some embodiments, the promoter element is a minimal promoter. Where the promoter is a proximal promoter, it is generally preferred that the proximal promoter is muscle- specific or cardiac muscle-specific.

[0527] In some preferred embodiments the promoter element is SKM_18 or functional variant thereof. SKM_18 is a muscle-specific proximal promoter. In some embodiments the cardiac muscle-specific promoter comprises the following elements (or functional variants thereof): CRE0107 and then SKM_18.

[0528] CRE0107 has the nucleic acid sequence of SEQ ID NO: 48. Functional variants of SEQ ID NO: 48 thereof may have a sequence that is at least 60%, 65%, 70%, 75%, 80%, 85%, 90%, 95%, 96%, 97%, 98%, or 99% identical thereto.

[0529] Functional variants of CRE0107 are regulatory elements with sequences which vary from CRE0107, but which substantially retain activity as cardiac muscle-specific CREs. It will be appreciated by the skilled person that it is possible to vary the sequence of a CRE while retaining its ability to bind to the requisite transcription factors (TFs) and enhance expression. A functional variant can comprise substitutions, deletions and/or insertions compared to a reference CRE, provided they do not render the CRE substantially non-functional.

[0530] In some embodiments, a functional variant of CRE0107 can be viewed as a CRE which, when substituted in place of CRE0107 in a promoter, substantially retains its activity. For example, a cardiac muscle-specific promoter which comprises a functional variant of CRE0107 substituted in place of CRE0107 preferably retains 80% of its activity, more preferably 90% of its activity, more preferably 95% of its activity, and yet more preferably 100% of its activity. For example, considering promoter SP0478 as an example, CRE0107 in SP0478 can be replaced with a functional variant of CRE0107, and the promoter substantially retains its activity. Retention of activity can be assessed by comparing expression of a suitable reporter under the control of the reference promoter with an otherwise identical promoter comprising the substituted CRE under equivalent conditions.

[0531] It will be noted that the CRE0107 or functional variant thereof can be provided on either strand of a double stranded polynucleotide and can be provided in either orientation. As such, complementary and reverse complementary sequences of SEQ ID NO: 48 or a functional variant thereof fall within the scope of the invention. Single stranded nucleic acids comprising the sequence according to SEQ ID NO: 48 or a functional variant thereof also fall within the scope of the invention.

[0532] In some embodiments, the CRE0107 or a functional variant thereof, has a length of 300 or fewer nucleotides, 250 or fewer nucleotides, 200 or fewer nucleotides, 150 or fewer nucleotides, 125 or fewer nucleotides, or 100 or fewer nucleotides. The sequence of SKM_1 8 and variants thereof are set out above.

[0533] In some embodiments the cardiac muscle-specific promoter comprises the nucleic acid sequence of SEQ ID NO: 20, or a functional variant thereof. In some embodiments, functional variants of SEQ ID NO: 20 may have a sequence that is at least 60%, 65%, 70%, 75%, 80%, 85%, 90%, 95%, 96%, 97%, 98%, or 99% identical thereto. The promoter having a sequence according to SEQ ID NO: 20 is referred to as SP0478. The SP0478 promoter is particularly preferred in some embodiments. This promoter is predicted to be specific for cardiac muscle, which is advantageous in some circumstances.

### SP0479 and Variants Thereof

[0534] In some embodiments, the promoter is a synthetic cardiac muscle-specific promoter comprising CRE0108 operably linked to a promoter element. In some preferred embodiments, the synthetic cardiac muscle-specific promoter comprises CRE0108 immediately upstream of the promoter element.

[0535] The promoter element can be any suitable proximal or minimal promoter. In some embodiments, the promoter element is a minimal promoter. Where the promoter is a proximal promoter, it is generally preferred that the proximal promoter is muscle- specific or cardiac muscle-specific.

[0536] In some preferred embodiments the promoter element is SKM_18 or functional variant thereof. SKM_18 is a muscle-specific proximal promoter.

[0537] In some embodiments the cardiac muscle-specific promoter comprises the following elements (or functional variants thereof): CRE0108 and then SKM_18.

[0538] CRE0108 has the nucleic acid sequence of SEQ ID NO: 49. Functional variants of SEQ ID NO: 49 may have a sequence that is at least 60%, 65%, 70%, 75%, 80%, 85%, 90%, 95%, 96%, 97%, 98%, or 99% identical thereto.

[0539] Functional variants of CRE0108 are regulatory elements with sequences which vary from CRE0108, but which substantially retain activity as cardiac muscle-specific CREs. It will be appreciated by the skilled person that it is possible to vary the sequence of a CRE while retaining its ability to bind to the requisite transcription factors (TFs) and enhance expression. A functional variant can comprise substitutions, deletions and/or insertions compared to a reference CRE, provided they do not render the CRE substantially non-functional.

[0540] In some embodiments, a functional variant of CRE0108 can be viewed as a CRE which, when substituted in place of CRE0108 in a promoter, substantially retains its activity. For example, a cardiac muscle-specific promoter which comprises a functional variant of CRE0108 substituted in place of CRE0108 preferably retains 80% of its activity, more preferably 90% of its activity, more preferably 95% of its activity, and yet more preferably 100% of its activity. For example, considering promoter SP0479 as an example, CRE0108 in SP0479 can be replaced with a functional variant of CRE0108, and the promoter substantially retains its activity. Retention of activity can be assessed by comparing expression of a suitable reporter under the control of the reference promoter with an otherwise identical promoter comprising the substituted CRE under equivalent conditions.

[0541] It will be noted that the CRE0108 or functional variant thereof can be provided on either strand of a double stranded polynucleotide and can be provided in either orientation. As such, complementary and reverse complementary sequences of SEQ ID NO: 49 or a functional variant thereof fall within the scope of the invention. Single stranded nucleic acids comprising the sequence according to SEQ ID NO: 49 or a functional variant thereof also fall within the scope of the invention.

[0542] In some embodiments, the CRE0108 or a functional variant thereof, has a length of 250 or fewer nucleotides, 200 or fewer nucleotides, 150 or fewer nucleotides, 125 or fewer nucleotides, or 100 or fewer nucleotides. The sequence of SKM_18 and variants thereof are set out above.

[0543] In some embodiments the cardiac muscle-specific promoter comprises the nucleic acid sequence of SEQ ID NO: 21, or a functional variant thereof. In some embodiments, functional variants of SEQ ID NO: 21 may have a sequence that is at least 60%, 65%, 70%, 75%, 80%, 85%, 90%, 95%, 96%, 97%, 98%, or 99% identical thereto. The promoter having a sequence according to SEQ ID NO: 21 is referred to as SP0479. The SP0479 promoter is particularly preferred in some embodiments. This promoter is predicted to be specific for cardiac muscle, which is advantageous in some circumstances.

### SP0480 and Variants Thereof

[0544] In some embodiments, the promoter is a synthetic cardiac muscle-specific promoter comprising CRE0109 operably linked to a promoter element. In some preferred embodiments, the synthetic cardiac muscle-specific promoter comprises CRE0109 immediately upstream of the promoter element.

[0545] The promoter element can be any suitable proximal or minimal promoter. In some embodiments, the promoter element is a minimal promoter. Where the promoter is a proximal promoter, it is generally preferred that the proximal promoter is muscle- specific or cardiac muscle-specific.

[0546] In some preferred embodiments the promoter element is SKM_18 or functional variant thereof. SKM_18 is a muscle-specific proximal promoter. In some embodiments the cardiac muscle-specific promoter comprises the following elements (or functional variants thereof): CRE0109 and then SKM_18.

[0547] CRE0109 has the nucleic acid sequence of SEQ ID NO: 50. Functional variants of SEQ ID NO: 50 may have a sequence that is at least 60%, 65%, 70%, 75%, 80%, 85%, 90%, 95%, 96%, 97%, 98%, or 99% identical thereto.

[0548] Functional variants of CRE0109 are regulatory elements with sequences which vary from CRE0109, but which substantially retain activity as cardiac muscle-specific CREs. It will be appreciated by the skilled person that it is possible to vary the sequence of a CRE while retaining its ability to bind to the requisite transcription factors (TFs) and enhance expression. A functional variant can comprise substitutions, deletions and/or insertions compared to a reference CRE, provided they do not render the CRE substantially non-functional.

[0549] In some embodiments, a functional variant of CRE0109 can be viewed as a CRE which, when substituted in place of CRE0109 in a promoter, substantially retains its activity. For example, a cardiac muscle-specific promoter which comprises a functional variant of CRE0109 substituted in place of CRE0109 preferably retains 80% of its activity, more preferably 90% of its activity, more preferably 95% of its activity, and yet more preferably 100% of its activity. For example, considering promoter SP0480 as an example, CRE0109 in SP0480 can be replaced with a functional variant of CRE0109, and the promoter substantially retains its activity. Retention of activity can be assessed by comparing expression of a suitable reporter under the control of the reference promoter with an otherwise identical promoter comprising the substituted CRE under equivalent conditions.

[0550] It will be noted that the CRE0109 or functional variant thereof can be provided on either strand of a double stranded polynucleotide and can be provided in either orientation. As such, complementary and reverse complementary sequences of SEQ ID NO: 50 or a functional variant thereof fall within the scope of the invention. Single stranded nucleic acids comprising the sequence according to SEQ ID NO: 50 or a functional variant thereof also fall within the scope of the invention.

[0551] In some embodiments, the CRE0109 or a functional variant thereof, has a length of 300 or fewer nucleotides, 250 or fewer nucleotides, 200 or fewer nucleotides, 150 or fewer nucleotides, 125 or fewer nucleotides, or 100 or fewer nucleotides. The sequence of SKM_1 8 and variants thereof are set out above.

[0552] In some embodiments the cardiac muscle-specific promoter comprises the nucleic acid sequence of SEQ ID NO: 22, or a functional variant thereof. In some embodiments, functional variants of SEQ ID NO: 22 may have a sequence that is at least 60%, 65%, 70%, 75%, 80%, 85%, 90%, 95%, 96%, 97%, 98%, or 99% identical thereto. The promoter having a sequence according to SEQ ID NO: 22 is referred to as SP0480. The SP0480 promoter is particularly preferred in some embodiments. This promoter is predicted to be specific for cardiac muscle, which is advantageous in some circumstances.

### SP0481 and Variants Thereof

[0553] In some embodiments, the promoter is a synthetic cardiac muscle-specific promoter comprising CRE0033 operably linked to a promoter element. In some preferred embodiments, the synthetic cardiac muscle-specific promoter comprises CRE0033 immediately upstream of the promoter element.

[0554] The promoter element can be any suitable proximal or minimal promoter. In some embodiments, the promoter element is a minimal promoter. Where the promoter is a proximal promoter, it is generally preferred that the proximal promoter is muscle- specific or cardiac muscle-specific.

[0555] In some preferred embodiments the promoter element is CRE0110 or functional variant thereof. CRE0110 is a cardiac muscle-specific proximal promoter.

[0556] In some embodiments the cardiac muscle-specific promoter comprises the following elements (or functional variants thereof): CRE0033 and then CRE0110. The sequence of CRE0033 and variants thereof are set out above.

[0557] CRE0110 has the nucleic acid sequence of SEQ ID NO: 59. Functional variants of SEQ ID NO: 59 may have a sequence that is at least 60%, 65%, 70%, 75%, 80%, 85%, 90%, 95%, 96%, 97%, 98%, or 99% identical thereto.

[0558] As discussed above, functional variants of CRE0110 substantially retain the ability of CRE0110 to act as a cardiac muscle-specific promoter element. For example, when a functional variant of CRE0110 is substituted into cardiac muscle-specific promoter SP0481, the modified promoter retains at least 80% of its activity, more preferably at least 90% of its activity, more preferably at least 95% of its activity, and yet more preferably 100% of the activity of SP0481. Suitably the functional variant of CRE0110 comprises a sequence which has at least 70%, 80%, 90%, 95% or 99% identity to SEQ ID NO: 59.

[0559] In some preferred embodiments, a promoter element comprising or consisting of CRE0110 or a functional variant thereof has a length of 300 or fewer nucleotides, 250 or fewer nucleotides, 200 or fewer nucleotides, 150 or fewer nucleotides, 125 or fewer nucleotides, 110 or fewer nucleotides, or 95 or fewer nucleotides.

[0560] In some embodiments the cardiac muscle-specific promoter comprises the nucleic acid sequence of SEQ ID NO: 23, or a functional variant thereof. In some embodiments, functional variants of SEQ ID NO: 23 may have a sequence that is at least 60%, 65%, 70%, 75%, 80%, 85%, 90%, 95%, 96%, 97%, 98%, or 99% identical thereto. The promoter having a sequence according to SEQ ID NO: 23 is referred to as SP0481. The SP0481 promoter is particularly preferred in some embodiments. This promoter is predicted to be specific for cardiac muscle, which is advantageous in some circumstances.

### SP0482 and Variants Thereof

[0561] In some embodiments, the promoter is a synthetic cardiac muscle-specific promoter comprising CRE0111 operably linked to a promoter element. In some preferred embodiments, the synthetic cardiac muscle-specific promoter comprises CRE0111 immediately upstream of the promoter element.

[0562] The promoter element can be any suitable proximal or minimal promoter. In some embodiments, the promoter element is a minimal promoter. Where the promoter is a proximal promoter, it is generally preferred that the proximal promoter is muscle- specific or cardiac muscle-specific.

[0563] In some preferred embodiments the promoter element is SKM_18 or functional variant thereof. SKM_18 is a muscle-specific proximal promoter. In some embodiments the cardiac muscle-specific promoter comprises the following elements (or functional variants thereof): CRE0111 and then SKM_18.

[0564] CRE0111 has the nucleic acid sequence of SEQ ID NO: 51. Functional variants of SEQ ID NO: 51 may have a sequence that is at least 60%, 65%, 70%, 75%, 80%, 85%, 90%, 95%, 96%, 97%, 98%, or 99% identical thereto.

[0565] Functional variants of CRE0111 are regulatory elements with sequences which vary from CRE0111, but which substantially retain activity as cardiac muscle-specific CREs. It will be appreciated by the skilled person that it is possible to vary the sequence of a CRE while retaining its ability to bind to the requisite transcription factors (TFs) and enhance expression. A functional variant can comprise substitutions, deletions and/or insertions compared to a reference CRE, provided they do not render the CRE substantially non-functional.

[0566] In some embodiments, a functional variant of CRE0111 can be viewed as a CRE which, when substituted in place of CRE0111 in a promoter, substantially retains its activity. For example, a cardiac muscle-specific promoter which comprises a functional variant of CRE0111 substituted in place of CRE0111 preferably retains 80% of its activity, more preferably 90% of its activity, more preferably 95% of its activity, and yet more preferably 100% of its activity. For example, considering promoter SP0482 as an example, CRE0111 in SP0482 can be replaced with a functional variant of CRE0111, and the promoter substantially retains its activity. Retention of activity can be assessed by comparing expression of a suitable reporter under the control of the reference promoter with an otherwise identical promoter comprising the substituted CRE under equivalent conditions.

[0567] It will be noted that the CRE0111 or functional variant thereof can be provided on either strand of a double stranded polynucleotide and can be provided in either orientation. As such, complementary and reverse complementary sequences of SEQ ID NO: 51 or a functional variant thereof fall within the scope of the invention. Single stranded nucleic acids comprising the sequence according to SEQ ID NO: 51 or a functional variant thereof also fall within the scope of the invention.

[0568] In some embodiments, the CRE0111 or a functional variant thereof, has a length of 300 or fewer nucleotides, 200 or fewer nucleotides, 150 or fewer nucleotides, 125 or fewer nucleotides, or 100 or fewer nucleotides. The sequence of SKM_18 and variants thereof are set out above.

[0569] In some embodiments the cardiac muscle-specific promoter comprises the nucleic acid sequence of SEQ ID NO: 24, or a functional variant thereof. In some embodiments, functional variants of SEQ ID NO: 24 may have a sequence that is at least 60%, 65%, 70%, 75%, 80%, 85%, 90%, 95%, 96%, 97%, 98%, or 99% identical thereto. The promoter having a sequence according to SEQ ID NO: 24 is referred to as SP0482. The SP0482 promoter is particularly preferred in some embodiments. This promoter is predicted to be specific for cardiac muscle, which is advantageous in some circumstances.

### SP0483 and Variants Thereof

[0570] In some embodiments, the promoter is a synthetic cardiac muscle-specific promoter comprising CRE0033 operably linked to a promoter element. In some preferred embodiments, the synthetic cardiac muscle-specific promoter comprises CRE0033 immediately upstream of the promoter element.

[0571] The promoter element can be any suitable proximal or minimal promoter. In some embodiments, the promoter element is a minimal promoter. Where the promoter is a proximal promoter, it is generally preferred that the proximal promoter is muscle- specific or cardiac muscle-specific.

[0572] In some preferred embodiments the promoter element is CRE0112 or functional variant thereof. CRE0112 is a cardiac muscle-specific proximal promoter.

[0573] In some embodiments the cardiac muscle-specific promoter comprises the following elements (or functional variants thereof): CRE0033 and then CRE0112. The sequence of CRE0033 and variants thereof are set out above.

[0574] CRE0112 has the nucleic acid sequence of SEQ ID NO: 60. Functional variants of SEQ ID NO: 60 may have a sequence that is at least 60%, 65%, 70%, 75%, 80%, 85%, 90%, 95%, 96%, 97%, 98%, or 99% identical thereto.

[0575] As discussed above, functional variants of CRE0112 substantially retain the ability of CRE0112 to act as a cardiac muscle-specific promoter element. For example, when a functional variant of CRE0112 is substituted into cardiac muscle-specific promoter SP0483, the modified promoter retains at least 80% of its activity, more preferably at least 90% of its activity, more preferably at least 95% of its activity, and yet more preferably 100% of the activity of SP0483. Suitably the functional variant of CRE0112 comprises a sequence which has at least 70%, 80%, 90%, 95% or 99% identity to SEQ ID NO: 60.

[0576] In some preferred embodiments, a promoter element comprising or consisting of CRE0112 or a functional variant thereof has a length of 300 or fewer nucleotides, 250 or fewer nucleotides, 200 or fewer nucleotides, 150 or fewer nucleotides, 125 or fewer nucleotides, 110 or fewer nucleotides, or 95 or fewer nucleotides.

[0577] In some embodiments the cardiac muscle-specific promoter comprises the nucleic acid sequence of SEQ ID NO: 25, or a functional variant thereof. In some embodiments, functional variants of SEQ ID NO: 25 may have a sequence that is at least 60%, 65%, 70%, 75%, 80%, 85%, 90%, 95%, 96%, 97%, 98%, or 99% identical thereto. The promoter having a sequence according to SEQ ID NO: 25 is referred to as SP0483. The SP0483 promoter is particularly preferred in some embodiments. This promoter is predicted to be specific for cardiac muscle, which is advantageous in some circumstances.

### SP0484 and Variants Thereof

[0578] In some embodiments, the promoter is a synthetic cardiac muscle-specific promoter comprising CRE0033 operably linked to a promoter element. In some preferred embodiments, the synthetic cardiac muscle-specific promoter comprises CRE0033 immediately upstream of the promoter element.

[0579] The promoter element can be any suitable proximal or minimal promoter. In some embodiments, the promoter element is a minimal promoter. Where the promoter is a proximal promoter, it is generally preferred that the proximal promoter is muscle- specific or cardiac muscle-specific.

[0580] In some preferred embodiments the promoter element is CRE0113 or functional variant thereof. CRE0113 is a cardiac muscle-specific proximal promoter.

[0581] In some embodiments the cardiac muscle-specific promoter comprises the following elements (or functional variants thereof): CRE0033 and then CRE0113. The sequence of CRE0033 and variants thereof are set out above.

[0582] CRE0113 has the nucleic acid sequence of SEQ ID NO: 61. Functional variants of SEQ ID NO: 61 may have a sequence that is at least 60%, 65%, 70%, 75%, 80%, 85%, 90%, 95%, 96%, 97%, 98%, or 99% identical thereto.

[0583] As discussed above, functional variants of CRE0 113 substantially retain the ability of CRE0113 to act as a cardiac muscle-specific promoter element. For example, when a functional variant of CRE0113 is substituted into cardiac muscle-specific promoter SP0484, the modified promoter retains at least 80% of its activity, more preferably at least 90% of its activity, more preferably at least 95% of its activity, and yet more preferably 100% of the activity of SP0484. Suitably the functional variant of CRE0113 comprises a sequence which has at least 70%, 80%, 90%, 95% or 99% identity to SEQ ID NO: 61.

[0584] In some preferred embodiments, a promoter element comprising or consisting of CRE0113 or a functional variant thereof has a length of 300 or fewer nucleotides, 250 or fewer nucleotides, 200 or fewer nucleotides, 150 or fewer nucleotides, 125 or fewer nucleotides, 110 or fewer nucleotides, or 95 or fewer nucleotides.

[0585] In some embodiments the cardiac muscle-specific promoter comprises the nucleic acid sequence of SEQ ID NO: 26, or a functional variant thereof. In some embodiments, functional variants of SEQ ID NO: 26 may have a sequence that is at least 60%, 65%, 70%, 75%, 80%, 85%, 90%, 95%, 96%, 97%, 98%, or 99% identical thereto. The promoter having a sequence according to SEQ ID NO: 26 is referred to as SP0484. The SP0484 promoter is particularly preferred in some embodiments. This promoter is predicted to be specific for cardiac muscle, which is advantageous in some circumstances.

### SP0485 and Variants Thereof

[0586] In some embodiments, the promoter is a synthetic cardiac muscle-specific promoter comprising CRE0114 operably linked to a promoter element. In some preferred embodiments, the synthetic cardiac muscle-specific promoter comprises CRE0114 immediately upstream of the promoter element.

[0587] The promoter element can be any suitable proximal or minimal promoter. In some embodiments, the promoter element is a minimal promoter. Where the promoter is a proximal promoter, it is generally preferred that the proximal promoter is muscle- specific or cardiac muscle-specific. In some preferred embodiments the promoter element is SKM_18 or functional variant thereof. SKM_18 is a muscle-specific proximal promoter. In some embodiments the cardiac muscle-specific promoter comprises the following elements (or functional variants thereof): CRE0114 and then SKM_18.

[0588] CRE0114 has the nucleic acid sequence of SEQ ID NO: 52. Functional variants of SEQ ID NO: 52 may have a sequence that is at least 60%, 65%, 70%, 75%, 80%, 85%, 90%, 95%, 96%, 97%, 98%, or 99% identical thereto.

[0589] Functional variants of CRE0 114 are regulatory elements with sequences which vary from CRE0114, but which substantially retain activity as cardiac muscle-specific CREs. It will be appreciated by the skilled person that it is possible to vary the sequence of a CRE while retaining its ability to bind to the requisite transcription factors (TFs) and enhance expression. A functional variant can comprise substitutions, deletions and/or insertions compared to a reference CRE, provided they do not render the CRE substantially non-functional.

[0590] In some embodiments, a functional variant of CRE0114 can be viewed as a CRE which, when substituted in place of CRE0114 in a promoter, substantially retains its activity. For example, a cardiac muscle-specific promoter which comprises a functional variant of CRE0114 substituted in place of CRE0114 preferably retains 80% of its activity, more preferably 90% of its activity, more preferably 95% of its activity, and yet more preferably 100% of its activity. For example, considering promoter SP0485 as an example, CRE0114 in SP0485 can be replaced with a functional variant of CRE0114, and the promoter substantially retains its activity. Retention of activity can be assessed by comparing expression of a suitable reporter under the control of the reference promoter with an otherwise identical promoter comprising the substituted CRE under equivalent conditions.

[0591] It will be noted that the CRE0114 or functional variant thereof can be provided on either strand of a double stranded polynucleotide and can be provided in either orientation. As such, complementary and reverse complementary sequences of SEQ ID NO: 52 or a functional variant thereof fall within the scope of the invention. Single stranded nucleic acids comprising the sequence according to SEQ ID NO: 52 or a functional variant thereof also fall within the scope of the invention.

[0592] In some embodiments, the CRE0114 or a functional variant thereof, has a length of 200 or fewer nucleotides, 150 or fewer nucleotides, 125 or fewer nucleotides, or 100 or fewer nucleotides.

[0593] The sequence of SKM_18 and variants thereof are set out above.

[0594] In some embodiments the cardiac muscle-specific promoter comprises the nucleic acid sequence of SEQ ID NO: 27, or a functional variant thereof. In some embodiments, functional variants of SEQ ID NO: 27 may have a sequence that is at least 60%, 65%, 70%, 75%, 80%, 85%, 90%, 95%, 96%, 97%, 98%, or 99% identical thereto. The promoter having a sequence according to SEQ ID NO: 27 is referred to as SP0485. The SP0485 promoter is particularly preferred in some embodiments. This promoter is predicted to be specific for cardiac muscle, which is advantageous in some circumstances.

### SP0486 and Variants Thereof

[0595] In some embodiments, the promoter is a synthetic cardiac muscle-specific promoter comprising CRE0033 operably linked to a promoter element. In some preferred embodiments, the synthetic cardiac muscle-specific promoter comprises CRE0033 immediately upstream of the promoter element.

[0596] The promoter element can be any suitable proximal or minimal promoter. In some embodiments, the promoter element is a minimal promoter. Where the promoter is a proximal promoter, it is generally preferred that the proximal promoter is muscle- specific or cardiac muscle-specific.

[0597] In some preferred embodiments the promoter element is CRE0115 or functional variant thereof. CRE0115 is a cardiac muscle-specific proximal promoter. In some embodiments the cardiac muscle-specific promoter comprises the following elements (or functional variants thereof): CRE0033 and then CRE0115.

[0598] The sequence of CRE0033 and variants thereof are set out above.

[0599] CRE0115 has the nucleic acid sequence of SEQ ID NO: 62. Functional variants of SEQ ID NO: 62 may have a sequence that is at least 60%, 65%, 70%, 75%, 80%, 85%, 90%, 95%, 96%, 97%, 98%, or 99% identical thereto.

[0600] As discussed above, functional variants of CRE0 115 substantially retain the ability of CRE0115 to act as a cardiac muscle-specific promoter element. For example, when a functional variant of CRE0115 is substituted into cardiac muscle-specific promoter SP0486, the modified promoter retains at least 80% of its activity, more preferably at least 90% of its activity, more preferably at least 95% of its activity, and yet more preferably 100% of the activity of SP0486. Suitably the functional variant of CRE0115 comprises a sequence which has at least 70%, 80%, 90%, 95% or 99% identity to SEQ ID NO: 62.

[0601] In some preferred embodiments, a promoter element comprising or consisting of CRE0115 or a functional variant thereof has a length of 300 or fewer nucleotides, 250 or fewer nucleotides, 200 or fewer nucleotides, 150 or fewer nucleotides, 125 or fewer nucleotides, 110 or fewer nucleotides, or 95 or fewer nucleotides.

[0602] In some embodiments the cardiac muscle-specific promoter comprises the nucleic acid sequence of SEQ ID NO: 28, or a functional variant thereof. In some embodiments, functional variants of SEQ ID NO: 28 may have a sequence that is at least 60%, 65%, 70%, 75%, 80%, 85%, 90%, 95%, 96%, 97%, 98%, or 99% identical thereto. The promoter having a sequence according to SEQ ID NO: 28 is referred to as SP0486. The SP0486 promoter is particularly preferred in some embodiments. This promoter is predicted to be specific for cardiac muscle, which is advantageous in some circumstances.

### SP0487 and Variants Thereof

[0603] In some embodiments, the promoter is a synthetic cardiac muscle-specific promoter comprising CRE0033 operably linked to a promoter element. In some preferred embodiments, the synthetic cardiac muscle-specific promoter comprises CRE0033 immediately upstream of the promoter element.

[0604] The promoter element can be any suitable proximal or minimal promoter. In some embodiments, the promoter element is a minimal promoter. Where the promoter is a proximal promoter, it is generally preferred that the proximal promoter is muscle- specific or cardiac muscle-specific. In some preferred embodiments the promoter element is CRE0116 or functional variant thereof. CRE0116 is a cardiac muscle-specific proximal promoter. In some embodiments the cardiac muscle-specific promoter comprises the following elements (or functional variants thereof): CRE0033 and then CRE0116. The sequence of CRE0033 and variants thereof are set out above.

[0605] CRE0116 has the nucleic acid sequence of SEQ ID NO: 63. Functional variants of SEQ ID NO: 63 may have a sequence that is at least 60%, 65%, 70%, 75%, 80%, 85%, 90%, 95%, 96%, 97%, 98%, or 99% identical thereto.

[0606] As discussed above, functional variants of CRE0116 substantially retain the ability of CRE0116 to act as a cardiac muscle-specific promoter element. For example, when a functional variant of CRE0116 is substituted into cardiac muscle-specific promoter SP0487, the modified promoter retains at least 80% of its activity, more preferably at least 90% of its activity, more preferably at least 95% of its activity, and yet more preferably 100% of the activity of SP0487. Suitably the functional variant of CRE0116 comprises a sequence which has at least 70%, 80%, 90%, 95% or 99% identity to SEQ ID NO: 63.

[0607] In some preferred embodiments, a promoter element comprising or consisting of CRE0116 or a functional variant thereof has a length of 300 or fewer nucleotides, 250 or fewer nucleotides, 200 or fewer nucleotides, 150 or fewer nucleotides, 125 or fewer nucleotides, 110 or fewer nucleotides, or 95 or fewer nucleotides.

[0608] In some embodiments the cardiac muscle-specific promoter comprises the nucleic acid sequence of SEQ ID NO: 29, or a functional variant thereof. In some embodiments, functional variants of SEQ ID NO: 29 may have a sequence that is at least 60%, 65%, 70%, 75%, 80%, 85%, 90%, 95%, 96%, 97%, 98%, or 99% identical thereto. The promoter having a sequence according to SEQ ID NO: 29 is referred to as SP0487. The SP0487 promoter is particularly preferred in some embodiments. This promoter is predicted to be specific for cardiac muscle, which is advantageous in some circumstances.

### SP0488 and Variants Thereof

[0609] In some embodiments, the promoter is a synthetic cardiac muscle-specific promoter comprising CRE0117 operably linked to a promoter element. In some preferred embodiments, the synthetic cardiac muscle-specific promoter comprises CRE0117 immediately upstream of the promoter element.

[0610] The promoter element can be any suitable proximal or minimal promoter. In some embodiments, the promoter element is a minimal promoter. Where the promoter is a proximal promoter, it is generally preferred that the proximal promoter is muscle- specific or cardiac muscle-specific.

[0611] In some preferred embodiments the promoter element is SKM_18 or functional variant thereof. SKM_18 is a muscle-specific proximal promoter. In some embodiments the cardiac muscle-specific promoter comprises the following elements (or functional variants thereof): CRE0117 and then SKM_18.

[0612] CRE0117 has the nucleic acid sequence of SEQ ID NO: 53. Functional variants of SEQ ID NO: 53 may have a sequence that is at least 60%, 65%, 70%, 75%, 80%, 85%, 90%, 95%, 96%, 97%, 98%, or 99% identical thereto.

[0613] Functional variants of CRE0117 are regulatory elements with sequences which vary from CRE0117, but which substantially retain activity as cardiac muscle-specific CREs. It will be appreciated by the skilled person that it is possible to vary the sequence of a CRE while retaining its ability to bind to the requisite transcription factors (TFs) and enhance expression. A functional variant can comprise substitutions, deletions and/or insertions compared to a reference CRE, provided they do not render the CRE substantially non-functional.

[0614] In some embodiments, a functional variant of CRE0117 can be viewed as a CRE which, when substituted in place of CRE0117 in a promoter, substantially retains its activity. For example, a cardiac muscle-specific promoter which comprises a functional variant of CRE0117 substituted in place of CRE0117 preferably retains 80% of its activity, more preferably 90% of its activity, more preferably 95% of its activity, and yet more preferably 100% of its activity. For example, considering promoter SP0488 as an example, CRE0117 in SP0488 can be replaced with a functional variant of CRE0117, and the promoter substantially retains its activity. Retention of activity can be assessed by comparing expression of a suitable reporter under the control of the reference promoter with an otherwise identical promoter comprising the substituted CRE under equivalent conditions.

[0615] It will be noted that the CRE0117 or functional variant thereof can be provided on either strand of a double stranded polynucleotide and can be provided in either orientation. As such, complementary and reverse complementary sequences of SEQ ID NO: 53 or a functional variant thereof fall within the scope of the invention. Single stranded nucleic acids comprising the sequence according to SEQ ID NO: 53 or a functional variant thereof also fall within the scope of the invention.

[0616] In some embodiments, the CRE0117 or a functional variant thereof, has a length of 300 or fewer nucleotides, 200 or fewer nucleotides, 150 or fewer nucleotides, 125 or fewer nucleotides, or 100 or fewer nucleotides.

[0617] The sequence of SKM_18 and variants thereof are set out above.

[0618] In some embodiments the cardiac muscle-specific promoter comprises the nucleic acid sequence of SEQ ID NO: 30, or a functional variant thereof. In some embodiments, functional variants of SEQ ID NO: 30 may have a sequence that is at least 60%, 65%, 70%, 75%, 80%, 85%, 90%, 95%, 96%, 97%, 98%, or 99% identical thereto. The promoter having a sequence according to SEQ ID NO: 30 is referred to as SP0488. The SP0488 promoter is particularly preferred in some embodiments. This promoter is predicted to be specific for cardiac muscle, which is advantageous in some circumstances.

### SP0489 and Variants Thereof

[0619] In some embodiments, the promoter is a synthetic cardiac muscle-specific promoter comprising CRE0033 operably linked to a promoter element. In some preferred embodiments, the synthetic cardiac muscle-specific promoter comprises CRE0033 immediately upstream of the promoter element.

[0620] The promoter element can be any suitable proximal or minimal promoter. In some embodiments, the promoter element is a minimal promoter. Where the promoter is a proximal promoter, it is generally preferred that the proximal promoter is muscle- specific or cardiac muscle-specific.

[0621] In some preferred embodiments the promoter element is CRE0104 or functional variant thereof. CRE0104 is a cardiac muscle-specific proximal promoter. In some embodiments the cardiac muscle-specific promoter comprises the following elements (or functional variants thereof): CRE0033 and then CRE0104.

[0622] The sequence of CRE0033 and variants thereof are set out above.

[0623] CRE0104 has the nucleic acid sequence of SEQ ID NO: 58. Functional variants of SEQ ID NO: 58 may have a sequence that is at least 60%, 65%, 70%, 75%, 80%, 85%, 90%, 95%, 96%, 97%, 98%, or 99% identical thereto.

[0624] As discussed above, functional variants of CRE0104 substantially retain the ability of CRE0104 to act as a cardiac muscle-specific promoter element. For example, when a functional variant of CRE0104 is substituted into cardiac muscle-specific promoter SP0489, the modified promoter retains at least 80% of its activity, more preferably at least 90% of its activity, more preferably at least 95% of its activity, and yet more preferably 100% of the activity of SP0489. Suitably the functional variant of CRE0104 comprises a sequence which has at least 70%, 80%, 90%, 95% or 99% identity to SEQ ID NO: 58.

[0625] In some preferred embodiments, a promoter element comprising or consisting of CRE0104 or a functional variant thereof has a length of 400 or fewer nucleotides, 300 or fewer nucleotides, 250 or fewer nucleotides, 200 or fewer nucleotides, 150 or fewer nucleotides, 125 or fewer nucleotides, 110 or fewer nucleotides, or 95 or fewer nucleotides.

[0626] In some embodiments the cardiac muscle-specific promoter comprises the nucleic acid sequence of SEQ ID NO: 31, or a functional variant thereof. In some embodiments, functional variants of SEQ ID NO: 31 may have a sequence that is at least 60%, 65%, 70%, 75%, 80%, 85%, 90%, 95%, 96%, 97%, 98%, or 99% identical thereto. The promoter having a sequence according to SEQ ID NO: 31 is referred to as SP0489. The SP0489 promoter is particularly preferred in some embodiments. This promoter is predicted to be specific for cardiac muscle, which is advantageous in some circumstances.

### SP0490 and Variants Thereof

[0627] In some embodiments, the promoter is a synthetic cardiac muscle-specific promoter comprising CRE0106 operably linked to a promoter element. In some preferred embodiments, the synthetic cardiac muscle-specific promoter comprises CRE0106 immediately upstream of the promoter element.

[0628] The promoter element can be any suitable proximal or minimal promoter. In some embodiments, the promoter element is a minimal promoter. Where the promoter is a proximal promoter, it is generally preferred that the proximal promoter is muscle- specific or cardiac muscle-specific. In some preferred embodiments the promoter element is CRE01 10 or functional variant thereof. CRE0110 is a cardiac muscle-specific proximal promoter. In some embodiments the cardiac muscle-specific promoter comprises the following elements (or functional variants thereof): CRE0106 and then CRE0110. The sequence of CRE0106 and variants thereof are set out above. The sequence of CRE0110 and variants thereof are set out above.

[0629] In some embodiments the cardiac muscle-specific promoter comprises the nucleic acid sequence of SEQ ID NO: 32, or a functional variant thereof. In some embodiments, functional variants of SEQ ID NOL 32 may have a sequence that is at least 60%, 65%, 70%, 75%, 80%, 85%, 90%, 95%, 96%, 97%, 98%, or 99% identical thereto. The promoter having a sequence according to SEQ ID NO: 32 is referred to as SP0490. The SP0490 promoter is particularly preferred in some embodiments. This promoter is predicted to be specific for cardiac muscle, which is advantageous in some circumstances.

### SP0491 and Variants Thereof

[0630] In some embodiments, the promoter is a synthetic cardiac muscle-specific promoter comprising CRE0107 operably linked to a promoter element. In some preferred embodiments, the synthetic cardiac muscle-specific promoter comprises CRE0107 immediately upstream of the promoter element.

[0631] The promoter element can be any suitable proximal or minimal promoter. In some embodiments, the promoter element is a minimal promoter. Where the promoter is a proximal promoter, it is generally preferred that the proximal promoter is muscle- specific or cardiac muscle-specific.

[0632] In some preferred embodiments the promoter element is CRE0110 or functional variant thereof. CRE0110 is a cardiac muscle-specific proximal promoter. In some embodiments the cardiac muscle-specific promoter comprises the following elements (or functional variants thereof): CRE0107 and then CRE0110. The sequence of CRE0107 and variants thereof are set out above. The sequence of CRE0110 and variants thereof are set out above.

[0633] In some embodiments the cardiac muscle-specific promoter comprises the nucleic acid sequence of SEQ ID NO: 33, or a functional variant thereof. In some embodiments, functional variants of SEQ ID NO: 33 may have a sequence that is at least 60%, 65%, 70%, 75%, 80%, 85%, 90%, 95%, 96%, 97%, 98%, or 99% identical thereto. The promoter having a sequence according to SEQ ID NO: 33 is referred to as SP0491. The SP0491 promoter is particularly preferred in some embodiments. This promoter is predicted to be specific for cardiac muscle, which is advantageous in some circumstances.

### SP0492 and Variants Thereof

[0634] In some embodiments, the promoter is a synthetic cardiac muscle-specific promoter comprising CRE0106 operably linked to a promoter element. In some preferred embodiments, the synthetic cardiac muscle-specific promoter comprises CRE0106 immediately upstream of the promoter element.

[0635] The promoter element can be any suitable proximal or minimal promoter. In some embodiments, the promoter element is a minimal promoter. Where the promoter is a proximal promoter, it is generally preferred that the proximal promoter is muscle- specific or cardiac muscle-specific.

[0636] In some preferred embodiments the promoter element is CRE0116 or functional variant thereof. CRE0116 is a cardiac muscle-specific proximal promoter.

[0637] In some embodiments the cardiac muscle-specific promoter comprises the following elements (or functional variants thereof): CRE0106 and then CRE0116. The sequence of CRE0106 and variants thereof are set out above. The sequence of CRE0116 and variants thereof are set out above.

[0638] In some embodiments the cardiac muscle-specific promoter comprises the nucleic acid sequence of SEQ ID NO: 34, or a functional variant thereof. In some embodiments, functional variants of SEQ ID NO: 34 may have a sequence that is at least 60%, 65%, 70%, 75%, 80%, 85%, 90%, 95%, 96%, 97%, 98%, or 99% identical thereto. The promoter having a sequence according to SEQ ID NO: 34 is referred to as SP0492. The SP0492 promoter is particularly preferred in some embodiments. This promoter is predicted to be specific for cardiac muscle, which is advantageous in some circumstances.

### SP0493 and Variants Thereof

[0639] In some embodiments, the promoter is a synthetic cardiac muscle-specific promoter comprising CRE0107 operably linked to a promoter element. In some preferred embodiments, the synthetic cardiac muscle-specific promoter comprises CRE0107 immediately upstream of the promoter element.

[0640] The promoter element can be any suitable proximal or minimal promoter. In some embodiments, the promoter element is a minimal promoter. Where the promoter is a proximal promoter, it is generally preferred that the proximal promoter is muscle- specific or cardiac muscle-specific.

[0641] In some preferred embodiments the promoter element is CRE0116 or functional variant thereof. CRE0116 is a cardiac muscle-specific proximal promoter. In some embodiments the cardiac muscle-specific promoter comprises the following elements (or functional variants thereof): CRE0107 and then CRE0116. The sequence of CRE0107 and variants thereof are set out above. The sequence of CRE0116 and variants thereof are set out above.

[0642] In some embodiments the cardiac muscle-specific promoter comprises the nucleic acid sequence of SEQ ID NO: 35, or a functional variant thereof. In some embodiments, functional variants of SEQ ID NO: 35 may have a sequence that is at least 60%, 65%, 70%, 75%, 80%, 85%, 90%, 95%, 96%, 97%, 98%, or 99% identical thereto. The promoter having a sequence according to SEQ ID NO: 35 is referred to as SP0493. The SP0493 promoter is particularly preferred in some embodiments. This promoter has been found to be specific for cardiac muscle, which is advantageous in some circumstances.

### SP0494 and Variants Thereof

[0643] In some embodiments, the promoter is a synthetic cardiac muscle-specific promoter comprising CRE0118 operably linked to a promoter element. In some preferred embodiments, the synthetic cardiac muscle-specific promoter comprises CRE0118 immediately upstream of the promoter element.

[0644] The promoter element can be any suitable proximal or minimal promoter. In some embodiments, the promoter element is a minimal promoter. Where the promoter is a proximal promoter, it is generally preferred that the proximal promoter is muscle- specific or cardiac muscle-specific.

[0645] In some preferred embodiments the promoter element is SKM_18 or functional variant thereof. SKM_18 is a muscle-specific proximal promoter. In some embodiments the cardiac muscle-specific promoter comprises the following elements (or functional variants thereof): CRE0118 and then SKM_18.

[0646] CRE0118 has the nucleic acid sequence of SEQ ID NO: 54. Functional variants of SEQ ID NO: 54 may have a sequence that is at least 60%, 65%, 70%, 75%, 80%, 85%, 90%, 95%, 96%, 97%, 98%, or 99% identical thereto.

[0647] Functional variants of CRE0118 are regulatory elements with sequences which vary from CRE0118, but which substantially retain activity as cardiac muscle-specific CREs. It will be appreciated by the skilled person that it is possible to vary the sequence of a CRE while retaining its ability to bind to the requisite transcription factors (TFs) and enhance expression. A functional variant can comprise substitutions, deletions and/or insertions compared to a reference CRE, provided they do not render the CRE substantially non-functional.

[0648] In some embodiments, a functional variant of CRE0118 can be viewed as a CRE which, when substituted in place of CRE0118 in a promoter, substantially retains its activity. For example, a cardiac muscle-specific promoter which comprises a functional variant of CRE0118 substituted in place of CRE0118 preferably retains 80% of its activity, more preferably 90% of its activity, more preferably 95% of its activity, and yet more preferably 100% of its activity. For example, considering promoter SP0494 as an example, CRE0118 in SP0494 can be replaced with a functional variant of CRE0118, and the promoter substantially retains its activity. Retention of activity can be assessed by comparing expression of a suitable reporter under the control of the reference promoter with an otherwise identical promoter comprising the substituted CRE under equivalent conditions.

[0649] It will be noted that the CRE0118 or functional variant thereof can be provided on either strand of a double stranded polynucleotide and can be provided in either orientation. As such, complementary and reverse complementary sequences of SEQ ID NO: 54 or a functional variant thereof fall within the scope of the invention. Single stranded nucleic acids comprising the sequence according to SEQ ID NO: 54 or a functional variant thereof also fall within the scope of the invention.

[0650] In some embodiments, the CRE0118 or a functional variant thereof, has a length of 300 or fewer nucleotides, 200 or fewer nucleotides, 150 or fewer nucleotides, 125 or fewer nucleotides, or 100 or fewer nucleotides.

[0651] The sequence of SKM_18 and variants thereof are set out above.

[0652] In some embodiments the cardiac muscle-specific promoter comprises the nucleic acid sequence of SEQ ID NO: 36, or a functional variant thereof. In some embodiments, functional variants of SEQ ID NO: 36 may have a sequence that is at least 60%, 65%, 70%, 75%, 80%, 85%, 90%, 95%, 96%, 97%, 98%, or 99% identical thereto. The promoter having a sequence according to SEQ ID NO: 36 is referred to as SP0494. The SP0494 promoter is particularly preferred in some embodiments. This promoter has been found to be specific for cardiac muscle, which is advantageous in some circumstances.

### SP0495 and Variants Thereof

[0653] In some embodiments, the promoter is a synthetic cardiac muscle-specific promoter comprising a combination of the cis-regulatory elements CRE0106 and CRE0033, or functional variants thereof. Typically the CREs are operably linked to a promoter element. In some preferred embodiments, the cardiac muscle-specific promoter comprises said CREs, or functional variants thereof, in the order CRE0106, CRE0033, and then the promoter element (order is given in an upstream to downstream direction, as is conventional in the art). In some preferred embodiments, the cardiac muscle-specific promoter comprises said CREs, or functional variants thereof, in the order CRE0033, CRE0106, and then the promoter element (order is given in an upstream to downstream direction, as is conventional in the art).

[0654] The promoter element can be any suitable proximal promoter or minimal promoter. In some embodiments, the promoter element is a minimal promoter. Where the promoter is a proximal promoter, it is generally preferred that the proximal promoter is muscle-specific or cardiac muscle-specific.

[0655] In some preferred embodiments, the promoter element is CRE0116, or a functional variant thereof. CRE0116 is a cardiac muscle-specific proximal promoter. Thus, in one embodiment the promoter comprises the following regulatory elements: CRE0106, CRE0033 and CRE0116, or functional variants thereof. The sequence of CRE0106 and variants thereof are set out above. The sequence of CRE0033 and variants thereof are set out above. The sequence of CRE0116 and variants thereof are set out above.

[0656] In some embodiments the cardiac muscle-specific promoter comprises the nucleic acid sequence of SEQ ID NO: 37, or a functional variant thereof. In some embodiments, functional variants of SEQ ID NO: 37 may have a sequence that is at least 60%, 65%, 70%, 75%, 80%, 85%, 90%, 95%, 96%, 97%, 98%, or 99% identical thereto. The promoter having a sequence according to SEQ ID NO: 37 is referred to as SP0495. The SP0495 promoter is particularly preferred in some embodiments. This promoter has been found to be specific for cardiac muscle, which is advantageous in some circumstances.

### SP0496 and Variants Thereof

[0657] In some embodiments, the promoter is a synthetic cardiac muscle-specific promoter comprising a combination of the cis-regulatory elements CRE0107 and CRE0033, or functional variants thereof. Typically the CREs are operably linked to a promoter element. In some preferred embodiments, the cardiac muscle-specific promoter comprises said CREs, or functional variants thereof, in the order CRE0107, CRE0033, and then the promoter element (order is given in an upstream to downstream direction, as is conventional in the art). In some preferred embodiments, the cardiac muscle-specific promoter comprises said CREs, or functional variants thereof, in the order CRE0033, CRE0107, and then the promoter element (order is given in an upstream to downstream direction, as is conventional in the art).

[0658] The promoter element can be any suitable proximal promoter or minimal promoter. In some embodiments, the promoter element is a minimal promoter. Where the promoter is a proximal promoter, it is generally preferred that the proximal promoter is muscle-specific or cardiac muscle-specific.

[0659] In some preferred embodiments, the promoter element is CRE0116, or a functional variant thereof. CRE0116 is a cardiac muscle-specific proximal promoter.

[0660] Thus, in one embodiment the promoter comprises the following regulatory elements: CRE0107, CRE0033 and CRE0116, or functional variants thereof. The sequence of CRE0106 and variants thereof are set out above. The sequence of CRE0033 and variants thereof are set out above. The sequence of CRE0116 and variants thereof are set out above.

[0661] In some embodiments the cardiac muscle-specific promoter comprises the nucleic acid sequence of SEQ ID NO: 38, or a functional variant thereof. In some embodiments, functional variants of SEQ ID NO: 38 may have a sequence that is at least 60%, 65%, 70%, 75%, 80%, 85%, 90%, 95%, 96%, 97%, 98%, or 99% identical thereto. The promoter having a sequence according to SEQ ID NO: 38 is referred to as SP0496. The SP0496 promoter is particularly preferred in some embodiments. This promoter has been found to be specific for cardiac muscle, which is advantageous in some circumstances.

### Tandem Promoters

[0662] In some embodiments, a synthetic cardiac muscle-specific promoter comprises two or more promoter elements. Synthetic promoters comprising two or more promoter elements are referred to herein as ‘tandem promoters’. For example, SP0452 is a tandem promoter as it comprises promoter elements CRE0082 and SKM_18. In some embodiments, a tandem promoter may comprise a promoter element directly upstream of another promoter element. In some embodiments, a tandem promoter may comprise one or more CREs upstream of one or each of the promoter elements. In some embodiments, a tandem promoter may comprise one or more CREs between the promoter elements. In some embodiments, any one of the synthetic cardiac muscle-specific promoters disclosed herein may be operably linked to a further promoter element. For example, SP0452 is synthetic promoter SP0067 operably linked to a promoter element CRE0082. It will be appreciated that synthetic promoter SP0067 may be operably linked to any other promoter element disclosed herein. Similarly, any other synthetic promoter disclosed herein may be operably linked to any promoter element disclosed herein.

### Composite Promoters

[0663] In some embodiments, the muscle-specific, cardiac muscle-specific or the skeletal muscle-specific promoters as set out above are operably linked to one or more additional regulatory sequences. An additional regulatory sequence can, for example, enhance expression compared to a muscle-specific, a cardiac muscle-specific, or a skeletal muscle-specific promoter which is not operably linked the additional regulatory sequence. Generally, it is preferred that the additional regulatory sequence does not substantively reduce the specificity of a muscle-specific, a cardiac muscle-specific, or a skeletal muscle-specific promoter.

[0664] For example, a synthetic muscle-specific, cardiac muscle-specific or skeletal muscle-specific promoter according to the present invention can be operably linked to a sequence encoding a UTR (e.g. a 5′ and/or 3′ UTR), and/or an intron, or suchlike. In some embodiments, the cardiac muscle-specific promoter is operably linked to sequence encoding a UTR, e.g. a 5′ UTR. A 5′ UTR can contain various elements that can regulate gene expression. The 5′ UTR in a natural gene begins at the transcription start site and ends one nucleotide before the start codon of the coding region. It should be noted that 5′ UTRs as referred to herein may be an entire naturally occurring 5′ UTR or it may be a portion of a naturally occurring 5′ UTR. The 5′UTR can also be partially or entirely synthetic. In eukaryotes, 5′ UTRs have a median length of approximately 150 nucleotides, but in some cases they can be considerably longer. Regulatory sequences that can be found in 5′ UTRs include, but are not limited to: (i) Binding sites for proteins, that may affect the mRNA’s stability or translation; (ii) Riboswitches; (iii) Sequences that promote or inhibit translation initiation; and (iv) Introns within 5′ UTRs have been linked to regulation of gene expression and mRNA export.

[0665] When a regulatory sequence comprises both a 5′ UTR and an intron, it may be called 5′UTR and intron. In some embodiments, a cardiac muscle-specific promoter as set out above is operably linked to a sequence encoding a 5′ UTR and an intron derived from the CMV major immediate gene (CMV-IE gene). For example, the 5′ UTR and intron from the CMV-IE gene suitably comprises the CMV-IE gene exon 1 and the CMV-IE gene exon 1, or portions thereof. In some cases, the promoter element may be modified in view of the linkage to the 5 ‘UTR, for example sequences downstream of the transcription start site (TSS) in the promoter element can be removed (e.g. replaced with the 5′ UTR).

[0666] The CMV-IE 5′UTR and intron is described in Simari, et al., Molecular Medicine 4: 700-706, 1998 “Requirements for Enhanced Transgene Expression by Untranslated Sequences from the Human Cytomegalovirus Immediate-Early Gene”, which is incorporated herein by reference. Variants of the CMV-IE 5′ UTR and intron sequences discussed in Simari, et al. are also set out in WO2002/031137, incorporated by reference, and the regulatory sequences disclosed therein can also be used.

[0667] Other UTRs that can be used in combination with a promoter are known in the art, e.g. in Leppek, K., Das, R. & Barna, M. “Functional 5′ UTR mRNA structures in eukaryotic translation regulation and how to find them”. Nat Rev Mol Cell Biol 19, 158-174 (2018), incorporated by reference.

[0668] In some embodiments the sequence encoding the 5′ UTR and intron comprises the nucleic acid sequence of SEQ ID NO: 65, or a functional variant thereof. In some embodiments, functional variants of SEQ ID NO: 65 may have a sequence that is at least 60%, 65%, 70%, 75%, 80%, 85%, 90%, 95%, 96%, 97%, 98%, or 99% identical thereto. SEQ ID NO: 65 encodes a CMV-IE 5′ UTR and intron.

[0669] Table 8 discloses the sequence identifier numbers for other exemplary elements (e.g. introns/UTR, polyA sequences) for use in the promoter sequences or in the rAAV contructs as disclosed herein:

TABLE 8

| | |
|---|---|
| NAME | SEQUENCE ID NO: |
| HBB | SEQ ID NO: 283 |
| CMV-IE 5′UTR AND INTRON | SEQ ID NO: 65 |
| minimal poly A sequence | SEQ ID NO: 284 |
| minimal poly A sequence | SEQ ID NO: 285 |
| SV40 early poly A | SEQ ID NO: 286 |
| RBG poly A | SEQ ID NO: 287 |
| FULL synthetic poly A sequence | SEQ ID NO: 288 |
| poly A | SEQ ID NO: 445 |

[0670] In some embodiments the 5′ UTR suitably comprises a nucleic acid motif that functions as the protein translation initiation site, e.g. sequences that define a Kozak sequence in the mRNA produced. For example, in some embodiments, the sequence encoding the 5′ UTR comprises the sequence motif GCCACC at or near its 3′ end. Other Kozak sequences or other protein translation initiation sites can be used, as is known in the art (e.g. Marilyn Kozak, “Point Mutations Define a Sequence Flanking the AUG Initiator Codon That Modulates Translation by Eukaryotic Ribosomes” Cell, Vol. 44, 283-292, Jan. 31, 1986; Marilyn Kozak “At Least Six Nucleotides Preceding the AUG Initiator Codon Enhance Translation in Mammalian Cells” J. Mol. Rid. (1987) 196, 947-950; Marilyn Kozak “An analysis of 5′-noncoding sequences from 699 vertebrate messenger RNAs” Nucleic Acids Research. Vol. 15 (20) 1987, all of which are incorporated herein by reference). The protein translation initiation site (e.g. Kozak sequence) is preferably positioned immediately adjacent to the start codon.

[0671] In some embodiments, any one of the promoters described above, or variants thereof, is linked to a sequence encoding a 5′ UTR and or 5′UTR and an intron to provide a composite promoter. Herein, such composite promoter may be referred to simply as “composite promoters”, or in some cases simply “promoters” for brevity.

[0672] In some embodiments, the SP0067 promoter, or variants thereof, as discussed above is linked to a sequence encoding a 5′UTR and an intron to provide a composite promoter. In some embodiments, the composite promoter comprises SEQ ID NO: 17, or a functional variant thereof. This composite promoter construct comprises SP0067 operably linked to the 5′ UTR and intron from the CMV-IE gene. This composite promoter is referred to as SP0475 as described herein above.

### III.CREs and Functional Variants Thereof

[0673] Disclosed herein are various CREs that can be used in construction of cardiac-specific promoters. Suitably, the CREs are cardiac-specific. These CREs are generally derived from genomic promoter and enhancer sequences, but they are used herein in contexts quite different from their native genomic environment. Generally, the CREs constitute small parts of much larger genomic regulatory domains, which control expression of the genes with which they are normally associated. It has been surprisingly found that these CREs, many of which are very small, can be isolated form their normal environment and retain cardiac-specific regulatory activity. This is surprising because the removal of a regulatory sequence from the complex and “three dimensional” natural context in the genome often results in a significant loss of activity, so there is no reason to expect a given CRE to retain the levels of activity observed once removed from their natural environment. It is even more surprising when a CRE retain cardiac-specific activity in an AAV vector. This is particularly the case as an AAV vector comprises Inverted Terminal Repeat (ITR) and has a different DNA structure compared to the genome and both ITRs and the DNA structure are known to influence the activity of CREs.

[0674] It should be noted that the sequences of the CREs of the present invention can be altered without causing a substantial loss of activity. Functional variants of the CREs can be prepared by modifying the sequence of the CREs, provided that modifications which are significantly detrimental to activity of the CRE are avoided. In view of the information provided in the present disclosure, modification of CREs to provide functional variants is straightforward. Moreover, the present disclosure provides methodologies for simply assessing the functionality of any given CRE variant.

[0675] The relatively small size of certain CREs according to the present invention is advantageous because it allows for the CREs, more specifically promoters containing them, to be provided in vectors while taking up the minimal amount of the payload of the vector. This is particularly important when a CRE is used in a vector with limited capacity, such as an AAV-based vector.

[0676] Table 3: Sequence Identifier number for the nucleic acid sequences of exemplary CREs (Cis-Regulatory Elements) for cardiac-specific promoters

TABLE 3

| | |
|---|---|
| CRM NAME | SEQUENCE ID NO: |
| CRE0004 | SEQ ID NO: 39 |
| CRE0028 | SEQ ID NO: 40 |
| CRE0033 | SEQ ID NO: 41 |
| CRE0070 | SEQ ID NO: 42 |
| CRE0071.3 | SEQ ID NO: 43 |
| CRE0095 | SEQ ID NO: 44 |
| CRE0096 | SEQ ID NO: 45 |
| CRE0105 | SEQ ID NO: 46 |
| CRE0106 | SEQ ID NO: 47 |
| CRE0107 | SEQ ID NO: 48 |
| CRE0108 | SEQ ID NO: 49 |
| CRE0109 | SEQ ID NO: 50 |
| CRE0111 | SEQ ID NO: 51 |
| CRE0114 | SEQ ID NO: 52 |
| CRE0117 | SEQ ID NO: 53 |
| CRE0118 | SEQ ID NO: 54 |

[0677] CREs of the present invention comprise certain cardiac-specific transcription factor binding sites (TFBS). It is generally desired that in functional variants of the CREs these Cardiac-specific TFBS remain functional. The skilled person is well aware that TFBS sequences can vary yet retain functionality. In view of this, the sequence for a TFBS is typically illustrated by a consensus sequence from which some degree of variation is typically present. Further information about the variation that occurs in a TFBS can be illustrated using a positional weight matrix (PWM), which represents the frequency with which a given nucleotide is typically found at a given location in the consensus sequence. Details of TF consensus sequences and associated positional weight matrices can be found in, for example, the Jaspar or Transfac databases http://jaspar.genereg.net/ and http://gene-regulation.com/ub/databases.html). This information allows the skilled person to modify the sequence in any given TFBS of a CRE in a manner which retains, and in some cases even increases, CRE functionality. In view of this the skilled person has ample guidance on how the TFBS for any given TF can be modified, while maintaining ability to bind the desired TF; the Jaspar system will, for example, score a putative TFBS based on its similarity to a given PWM. Furthermore, CREs can be scanned against all PWM from JASPAR database to identify/analyse all TFBS. The skilled person can of course find additional guidance in the literature, and, moreover, routine experimentation can be used to confirm TF binding to a putative TFBS in any variant CRE. It will be apparent that significant sequence modification in a CRE, even within TFBS in a CRE, can be made while retaining function.

[0678] CREs of the present invention can be used in combination with a wide range of suitable minimal promoters or Cardiac-specific proximal promoters.

[0679] Functional variants of a CRE include sequences which vary from the reference CRE element, but which substantially retain activity as Cardiac-specific CREs. It will be appreciated by the skilled person that it is possible to vary the sequence of a CRE while retaining its ability to recruit suitable Cardiac-specific transcription factors (TFs) and thereby enhance expression. A functional variant of a CRE can comprise substitutions, deletions and/or insertions compared to a reference CRE, provided they do not render the CRE substantially non-functional.

[0680] In some embodiments, a functional variant of a CRE can be viewed as a CRE which, when substituted in place of a reference CRE in a promoter, substantially retains its activity. For example, a cardiac-specific promoter which comprises a functional variant of a given CRE preferably retains at least 80% of its activity, more preferably at least 90% of its activity, more preferably at least 95% of its activity, and yet more preferably 100% of its activity (compared to the reference promoter comprising the unmodified CRE).

[0681] Suitably, functional variants of a CRE retain a significant level of sequence identity to a reference CRE. Suitably functional variants comprise a sequence that is at least 70% identical to the reference CRE, more preferably at least 80%, 90%, 95% or 99% identical to the reference CRE.

[0682] Retention of activity can be assessed by comparing expression of a suitable reporter under the control of the reference promoter with an otherwise identical promoter comprising the substituted CRE under equivalent conditions. Suitable assays for assessing cardiac-specific promoter activity are disclosed herein, e.g. in the examples.

[0683] In some embodiments, a CRE can be combined with one or more additional CREs to create a cis-regulatory module (CRM). Additional CREs can be provided upstream of the CREs according to the present invention, or downstream of the CRE according to the present invention. The additional CREs can be CREs disclosed herein, or they can be other CREs. Suitably, the additional CREs are cardiac-specific.

[0684] CREs according to the present invention or CRMs comprising CREs according to the present invention may comprise one or more additional regulatory elements. For example, they may comprise an inducible or repressible element, a boundary control element, an insulator, a locus control region, a response element, a binding site, a segment of a terminal repeat, a responsive site, a stabilizing element, a de-stabilizing element, and a splicing element, etc., provided that they do not render the CRE or CRM substantially non-functional.

[0685] A promoter comprising CREs according to the present invention may comprise spacers between the CRM and the minimal or proximal promoter and/or between CREs. Additionally, or alternatively, a spacer may be present on the 5′ end of the CRM.

[0686] It will be apparent that a CRE according to the present invention or a CRM comprising a CRE according to this invention, or functional variants thereof, can be combined with any suitable promoter elements in order to provide a synthetic cardiac-specific promoter according to the present invention. Suitably, the promoter element is a Cardiac-specific proximal promoter.

[0687] In many instances, shorter promoter sequences are preferred, particularly for use in situations where a vector (e.g. a viral vector such as AAV) has limited capacity. Accordingly, in some embodiments the CREs according to the present invention or functional variants thereof have a length of 600 or fewer nucleotides, for example 600, 500, 450, 400, 350, 300, 250, 200, 150, 100, 75, 60, 50 or fewer nucleotides. Suitably, the synthetic cardiac specific CRM comprising at least one of the CREs according to SEQ ID NOs 19-24, 27, 28 or a functional variant thereof has length of 1000 or fewer nucleotides, for example 950, 900, 850, 800, 750, 700, 650, 600, 550, 500, 450, 400, 350, 300, 250, 200, 150, 100, 75, 60, 50 or fewer nucleotides.

### IV.CRMs and Functional Variants Thereof

[0688] Various synthetic Cardiac-specific CRMs are disclosed herein that can be used in the constructions of synthetic cardiac-specific promoters. CRMs of the present invention can be used in combination with a wide range of suitable minimal promoters or Cardiac-specific proximal promoters.

[0689] Functional variants of a CRM include sequences which vary from the reference CRM element, but which substantially retain activity as Cardiac-specific CRMs. It will be appreciated by the skilled person that it is possible to vary the sequence of a CRM while retaining its ability to recruit suitable Cardiac-specific transcription factors (TFs) and thereby enhance expression. A functional variant of a CRM can comprise substitutions, deletions and/or insertions compared to a reference CRM, provided they do not render the CRM substantially non-functional.

[0690] In some embodiments, a functional variant of a CRM can be viewed as a CRM which, when substituted in place of a reference CRM in a promoter, substantially retains its activity. For example, a cardiac-specific promoter which comprises a functional variant of a given CRM preferably retains at least 80% of its activity, more preferably at least 90% of its activity, more preferably at least 95% of its activity, and yet more preferably 100% of its activity (compared to the reference promoter comprising the unmodified CRM).

[0691] Suitably, functional variants of a CRM retain a significant level of sequence identity to a reference CRM. Suitably functional variants comprise a sequence that is at least 70% identical to the reference CRM, more preferably at least 80%, 90%, 95% or 99% identical to the reference CRM.

[0692] Retention of activity can be assessed by comparing expression of a suitable reporter under the control of the reference promoter with an otherwise identical promoter comprising the substituted CRM under equivalent conditions. Suitable assays for assessing cardiac-specific promoter activity are disclosed herein, e.g. in the examples.

[0693] Functional variants of a given CRM can, in some embodiments, comprise functional variants of one or more of the CREs present in the reference CRM. For example, functional variants of a given CRM can comprise functional variants of 1 or 2 of the CREs present in the reference CRM.

[0694] Functional variants of a given CRM can, in some embodiments, comprise the same combination CREs as a reference CRM, but the CREs can be present in a different order from the reference CRM. It is usually preferred that the CREs are present in the same order as the reference CRM (thus, the functional variant of a CRM suitably comprises the same permutation of the CREs as set out in a reference CRM).

[0695] Functional variants of a given CRM can, in some embodiments, comprise one or more additional CREs to those present in a reference CRM. Additional CREs can be provided upstream of the CREs present in the reference CRM, downstream of the CREs present in the reference CRM, and/or between the CREs present in the reference CRM. The additional CREs can be CREs disclosed herein, or they can be other CREs. Generally, it is preferred that a functional variant of a given CRM comprises the same CREs (or functional variants thereof) and does not comprise additional CREs.

[0696] Functional variants of a given CRM can comprise one or more additional regulatory elements compared to a reference CRM. For example, they may comprise an inducible or repressible element, a boundary control element, an insulator, a locus control region, a response element, a binding site, a segment of a terminal repeat, a responsive site, a stabilizing element, a de-stabilizing element, and a splicing element, etc., provided that they do not render the CRM substantially non-functional.

[0697] Functional variants of a given CRM can comprise additional spacers between adjacent CREs or, if one or more spacer are present in the reference CRM, said one or more spacers can be longer or shorter than in the reference CRM. Spacers present in the reference CRM can be removed in the functional variant.

[0698] It will be apparent that the CRMs as disclosed herein, or functional variants thereof, can be combined with any suitable promoter elements in order to provide a synthetic cardiac-specific promoter according to the present invention. Suitably, the promoter element is a cardiac-specific proximal promoter.

[0699] In many instances, shorter promoter sequences are preferred, particularly for use in situations where a vector (e.g. a viral vector such as AAV) has limited capacity. Accordingly, in some embodiments the synthetic Cardiac-specific CRM has length of 500 or fewer nucleotides, for example 450, 400, 350, 300, 250, 200, 150, 100, 75, 60, 50 or fewer nucleotides.

### V.Synthetic Cardiac-Specific Promoters and Functional Variants Thereof

[0700] Various synthetic cardiac-specific promoters are disclosed herein. A functional variant of a reference synthetic cardiac-specific promoter is a promoter which comprises a sequence which varies from the reference synthetic cardiac-specific promoter, but which substantially retains cardiac-specific promoter activity. It will be appreciated by the skilled person that it is possible to vary the sequence of a synthetic cardiac-specific promoter while retaining its ability to recruit suitable Cardiac-specific transcription factors (TFs) and to recruit RNA polymerase II to provide cardiac-specific expression of an operably linked sequence (e.g. an open reading frame). A functional variant of a synthetic cardiac-specific promoter can comprise substitutions, deletions and/or insertions compared to a reference promoter, provided such substitutions, deletions and/or insertions do not render the synthetic cardiac-specific promoter substantially non-functional compared to the reference promoter.

[0701] Table 4: Exemplary minimal or proximal promoters used in some embodiments of the synthetic cardiac-specific promoters of Table 2A.

TABLE 4

| | |
|---|---|
| PROMOTER NAME | SEQUENCE ID NO: |
| SKM_18 | SEQ ID NO: 55 |
| SKM_20 | SEQ ID NO: 56 |
| CRE0082 | SEQ ID NO: 57 |
| CRE0104 | SEQ ID NO: 58 |
| CRE0110 | SEQ ID NO: 59 |
| CRE0112 | SEQ ID NO: 60 |
| CRE0113 | SEQ ID NO: 61 |
| CRE0115 | SEQ ID NO: 62 |
| CRE0116 | SEQ ID NO: 63 |
| CRE0038 | SEQ ID NO: 64 |

[0702] Accordingly, in some embodiments, a functional variant of a synthetic cardiac-specific promoter can be viewed as a variant which substantially retains the cardiac-specific promoter activity of the reference promoter. For example, a functional variant of a synthetic cardiac-specific promoter preferably retains at least 70% of the activity of the reference promoter, more preferably at least 80% of its activity, more preferably at least 90% of its activity, more preferably at least 95% of its activity, and yet more preferably 100% of its activity.

[0703] Functional variants of a synthetic cardiac-specific promoter often retain a significant level of sequence similarity to a reference synthetic cardiac-specific promoter. In some embodiments, functional variants comprise a sequence that is at least 70% identical to the reference synthetic cardiac-specific promoter, more preferably at least 80%, 90%, 95% or 99% identical to the reference synthetic cardiac-specific promoter.

[0704] Functional variants are defined herein below. Suitably, the synthetic cardiac-specific promoter may comprise a sequence which is at least 60%, 65%, 70%, 75%, 80%, 90%, 95%, 96%, 97%, 98% or 99% identical to any one of SEQ ID NOs: 3-64.

[0705] Activity in a functional variant can be assessed by comparing expression of a suitable reporter under the control of the reference synthetic cardiac-specific promoter with the putative functional variant under equivalent conditions. Suitable assays for assessing cardiac-specific promoter activity are disclosed herein, e.g. in the examples.

[0706] Functional variants of a given synthetic cardiac-specific promoter can comprise functional variants of a CRE present in the reference synthetic cardiac-specific promoter. Functional variants of a given synthetic cardiac-specific promoter can comprise functional variants of the CRM present in the reference synthetic cardiac-specific promoter. Functional variants of a given synthetic cardiac-specific promoter can comprise functional variants of the promoter element, or a different promoter element when compared to the reference synthetic cardiac-specific promoter.

[0707] Functional variants of a given synthetic cardiac-specific promoter can comprise one or more additional CREs to those present in a reference synthetic cardiac-specific promoter. Additional CREs can, for example, be provided upstream of the CREs present in the reference synthetic cardiac-specific promoter or downstream of the CREs present in the reference synthetic cardiac-specific promoter. The additional CREs can be CREs disclosed herein, or they can be other CREs.

[0708] Functional variants of a given synthetic cardiac-specific promoter can comprise additional spacers between adjacent elements (CREs, CRM or promoter element) or, if one or more spacers are present in the reference synthetic cardiac-specific promoter, said one or more spacers can be longer or shorter than in the reference synthetic cardiac-specific promoter. Alternatively, if one or more spacers are present in the reference synthetic cardiac-specific promoter, these spacers may be removed in the functional variant.

[0709] It will be apparent that synthetic cardiac-specific promoters of the present invention can comprise a CRE of the present invention or a CRM comprising a CRE of the present invention and additional regulatory sequences. For example, they may comprise one or more additional CREs, an inducible or repressible element, a boundary control element, an insulator, a locus control region, a response element, a binding site, a segment of a terminal repeat, a responsive site, a stabilizing element, a de-stabilizing element, and a splicing element, etc., provided that they do not render the promoter substantially non-functional.

[0710] Preferred synthetic cardiac-specific promoters of the present invention exhibit cardiac-specific promoter activity which is at least 15%, 20%, 25%, 30%, 40%, 50%, 60%, 70%, 80%, 90%, 100%, 125%, 150%, 175%, 200%, 250%, 300%, 350% or 400% of the activity exhibited by the CMV or myosin promoter in cardiac cells. In some embodiments, the expression level of the phosphatase inhibitor gene or other exemplary genes driven by synthetic cardiac specific promoters is equivalent to the expression level of those genes driven by CMV promoter in cardiac cells. In many cases higher levels of promoter activity is preferred, but this is not always the case; thus, in some cases more moderate levels of expression may be preferred. In some cases, it is desirable to have available a range of promoters of different activity levels to allow the level of expression to be tailored to requirements; the present disclose provides promoters with such a range of activities. Activity of a given synthetic cardiac-specific promoter of the present invention compared to a known promoter can be assessed by comparing Cardiac-specific expression of a reporter gene under control of the synthetic cardiac-specific promoter with expression of the same reporter under control of the known promoter, when the two promoters are provided in otherwise equivalent expression constructs and under equivalent conditions.

[0711] In addition to different activity levels, in some cases, it is desirable to have available a range of promoters with activity in different regions, such as different regions of the heart, e.g., ventricles versus atrium, or different heart cells, e.g., ventricular cardiomyocytes versus atrial cardiomyocytes or cardiac fibroblasts, or endothelial cells (EC) in the heart, as well as peri-vascular cells and pacemaker cells. Additionally, it may be desirable to have a range of promoters with different activity levels across different regions to allow the level of expression to be tailored to requirements. In some cases, expression in a specific region is desired. In some embodiments, expression in the cardiomyocytes is desired with little or no expression in the rest of the heart or rest of the body. Suitably, expression may be required in multiple regions within the heart. In some preferred embodiments, the cardiac-specific promoter according to the present invention shows activity in any or all of the following heart regions: aortic arch arteries (AA); aorta; cardiomyocytes (CM); endothelial or endocardial cells (ECs); inferior caval vein (ICV); interventricular septum (IVS); left atrium (LA); left superior caval vein (LSCV); left ventricle (LV); outflow tract (OT); pulmonary arteries (PO); proepicardial organ (PEO); pulmonary vein (PV); right atrium (RA); right superior caval vein (RSCV); right ventricle (RV); superior caval vein (SCV); cardiac smooth muscle cells (SMs). In some embodiments, the cardiac-specific promoter according to the present invention shows activity the heart areas mentioned above with little or no activity in other areas of the heart, other areas of the body.

[0712] In addition to different activity levels and different areas of activity, in some cases, it is desirable to have available a range of promoters with activity in different cells or combinations of cells, such as different cardiomyocytes populations. In some preferred embodiments, the cardiac-specific promoter according to the present invention shows activity in cardiomyocytes. In some preferred embodiments, the cardiac-specific promoter according to the present invention shows activity in ventricular cardiomyocytes or in conductive cardiomyocytes. In some preferred embodiments, the cardiac-specific promoter according to the present invention shows activity in cardiomyocytes and smooth muscle cells. In some preferred embodiments, the cardiac-specific promoter according to the present invention shows activity in ventricular cardiomyocytes, in conductive cardiomyocytes and smooth muscle cells in the heart. In some embodiments, the cardiac-specific promoter according to the present invention shows activity in cardiomyocytes with little or no expression in other heart cell types. In some embodiments, the cardiac-specific promoter according to the present invention shows activity in cardiomyocytes and smooth muscle cells in the heart with little or no expression in other heart cell types. In some embodiments, the cardiac-specific promoter according to the present invention shows activity in cardiomyocytes and in pacemaker cells with little or no expression in other heart cell types.

[0713] Alternatively, it might be preferred to have a widespread expression in all or almost all regions of the heart, suitably all areas of the contraction, e.g., in the cells that make up the ventricles and atrium.

[0714] Preferred synthetic cardiac-specific promoters of the present invention exhibit cardiac-specific promoter activity which is at least 15%, 20%, 25%, 30%, 40%, 50%, 60%, 70%, 80%, 90%, 100%, 125%, 150%, 175%, 200%, 250%, 300%, 350% or 400% of the activity exhibited by MLC-2v cardiac specific promoter. Activity of a given synthetic cardiac-specific promoter of the present invention compared to the MLC-2v promoter can be assessed by comparing cardiac-specific expression of a reporter gene under control of the synthetic cardiac-specific promoter with expression of the same reporter under control of MLC-2v promoter in heart tissue or heart cells, e.g., cardiomyocytes, when the two promoters are provided in otherwise equivalent expression constructs and under equivalent conditions. In some embodiments a synthetic cardiac-specific promoter of the invention is able to increase expression of a gene (e.g. a therapeutic gene or gene of interest) in the neurones of a subject by at least 20%, at least 40%, at least 60%, at least 80%, at least 100%, at least 200%, at least 300%, at least 500%, at least 1000% or more relative to a known cardiac-specific promoter, suitably MLC-2v promoter. The cardiac-specific expression of a synthetic cardiac-specific promoter as disclosed herein can be compared with other known cardiac-specific promoters, e.g.,, but are not limited to, promoters from the following genes: α myosin heavy chain genes such as ventricular α myosin heavy chain gene, β myosin heavy chain genes such as ventricular β myosin heavy chain gene, ventricular myosin Myosin light chain 2v gene such as light chain 2 gene, myosin light chain 2a gene such as ventricular myosin light chain 2 gene, cardiac myocyte-restricted cardiac ankyrin repeat protein (CARP) gene, cardiac α-actin gene, cardiac m2 muscarinic / acetylcholine gene, There are ANP gene, BNP gene, cardiac troponin C gene, cardiac troponin I gene, cardiac troponin T gene, cardiac sarcoplasmic reticulum Ca-AT ase gene, skeletal α-actin gene, and artificial heart cellspecific promoter.

[0715] In addition, the synthetic cardiac-specific promoter as disclosed herein can be compared with other chamber specific promoters or enhancers can be used, for example, the quail slow myosin chain type 3 (MyHC3) or ANP promoter, or cGATA-6 enhancer for atrial specific expression. The Iroquois homeobox gene can be used for ventricular specific expression. Examples of ventricular myocyte specific promoters include the ventricular myosin light chain 2 promoter and the ventricular myosin heavy chain promoter. In some embodiments, the synthetic cardiac-specific promoter as disclosed herein can be compared to other promoters and / or enhancers include Csx / NKX2.5 gene, titin gene, α-actinin gene, myomesin gene, M protein gene, cardiac troponin T gene, RyR2 gene, Cx40 gene, Cx43 gene, and even Mef2, There are genes that bind dHAND, GATA, CarG, E-box, Csx / NKX2.5, or TGF-beta, or combinations thereof.

[0716] In many instances, shorter promoter sequences are preferred, particularly for use in situations where a vector (e.g. a viral vector such as AAV) has limited capacity. Accordingly, in some embodiments the synthetic cardiac-specific promoter has length of 1000 or fewer nucleotides, for example, 900, 800, 700,600, 500, 450, 400, 350, 300, 250, 200, 150, 100, or fewer nucleotides. Particularly preferred synthetic cardiac-specific promoters are those that are both short and which exhibit high levels of activity.

[0717] It is surprising when a cardiac-specific promoter retains cardiac-specific activity in an AAV vector as the AAV vector’s ITRs and different DNA structure compared to the genome are known to influence the activity of promoters, often the ITRs and different DNA structure negatively impact the activity of promoters.

[0718] It is generally preferred that a cardiac-specific promoter according to the present invention which comprises a variant CRE of any one of Table 2A, 5A or Tables 3 or 6 retains at least 25%, 50%, 75%, 80%, 85%, 90%, 95% or 100% of the activity of the reference CRE. Retention of activity can be assessed by comparing expression of a suitable reporter under the control of the reference promoter with an otherwise identical promoter comprising the substituted CRE under equivalent conditions. Suitably said activity is assessed using the examples as described herein, but other methods can be used. Suitably the or each CRE is a cardiac-specific cis-regulatory element.

[0719] Suitably the promoter element is a minimal or proximal promoter. Preferably, when present, the proximal promoter is a cardiac-specific proximal promoter.

[0720] In some embodiments, the synthetic cardiac-specific promoter comprises or consists of a sequence according to any one of SEQ ID NOs 3-64, or a functional variant thereof. In some embodiments the synthetic cardiac-specific promoter comprises or consists of a sequence which is at least 60%, 65%, 70%, 75%, 80%, 85%, 90%, 95%, 96%, 97%, 98% or 99% identical to any one of SEQ ID NOs 3-64.

[0721] The present invention thus provides various synthetic cardiac-specific promoters and functional variants thereof. It is generally preferred that a promoter according to the present invention which is a variant of any one of SEQ ID NO 3-38 or 55, 56, 80-200, 290-329 retains at least 25%, 50%, 75%, 80%, 85%, 90%, 95% or 100% of the activity of the reference promoter. Suitably said activity is assessed using the examples as described herein, but other methods can be used. Suitably the minimal or proximal promoter can be operably linked with a CRE or CRM. The CRE may be a CRE according to this invention or any other CRE. The CRM may be a CRM according to this invention or may comprise a CRE according to this invention. Suitably, the CRE or the CRM is cardiac-specific.

[0722] Suitably the proximal promoter according to the present invention may be operably linked with one or more proximal promoters. A synthetic cardiac-specific promoter according to the present invention may comprise or consist of two proximal promoters. Suitably, a synthetic cardiac-specific promoter according to the present invention may comprise or consist of two or more proximal promoters. Suitably, the proximal promoters are Cardiac-specific proximal promoters. Suitably, the at least two proximal promoters may be operably linked to a CRE or a CRM according to the present invention.

[0723] The CREs, minimal/proximal promoters or promoters of the present invention can be active in specific region of the heart, preferably in cardiomyocytes, or in specific heart cell type or in a combination of heart cell types or in a combination of both. Suitably therefore the CREs, minimal/proximal promoters, or promoters of the present invention are cardiac-specific.

[0724] The CREs, minimal/proximal promoters or promoters of the present invention can be active in one or more of the various parts of the heart. Suitably, the CREs, minimal/proximal promoter or promoters of the present invention may be active in the heart. Suitably, the CREs, minimal/proximal promoter or promoters of the present invention may be active in the cardiomyocytes but not in any other part of the heart. Suitably the CREs, minimal/proximal promoter or promoters of the present invention may be active in one or more of the various areas within the heart.

[0725] In some embodiments, it may be desirable that the CRE, CRM, minimal/proximal promoter or promoter of the present invention shows widespread activity in the heart. In some embodiments, the CRE, CRM, minimal/proximal promoter or promoter of the present invention is active in all parts of the heart (pan-heart). In some embodiments, the CRE, CRM, minimal/proximal promoter or promoter of the present invention is active in 1, 2, 3, 4, 5, 6, 7, 8 or 9 of the areas of the heart recited above.

[0726] In some embodiments, it may be desirable that the CRE, minimal/proximal promoter or promoter of the present invention shows predominant activity in one area of the heart. Suitably, it may be desirable that the CRE, minimal/proximal promoter or promoter of the present invention shows activity in one area of the heart but no, or only minimal, activity in the rest of the heart. In some embodiments, the CRE, minimal/proximal promoter or promoter of the present invention is active in only one area of the areas of the heart recited above.

[0727] The CREs, minimal/proximal promoters or promoters of the present invention can be active in various cells of the heart. The predominant cell types in the heart are ventricular cardiomyocytes, atrial cardiomyocytes, cardiac fibroblasts, or endothelial cells (EC) in the heart, as well as peri-vascular cells and pacemaker cells. Additionally, the CREs, minimal/proximal promoters or promoters of the present invention can be active in various regions of the heart, such as, for example, activity in any or all of the following heart regions: aortic arch arteries (AA); aorta; cardiomyocytes (CM); endothelial or endocardial cells (ECs); inferior caval vein (ICV); interventricular septum (IVS); left atrium (LA); left superior caval vein (LSCV); left ventricle (LV); outflow tract (OT); pulmonary arteries (PO); proepicardial organ (PEO); pulmonary vein (PV); right atrium (RA); right superior caval vein (RSCV); right ventricle (RV); superior caval vein (SCV); cardiac smooth muscle cells (SMs). In some embodiments, the cardiac-specific promoter according to the present invention shows activity the heart areas mentioned above with little or no activity in other areas of the heart, other areas of the body. Other cell types may be present, particularly in inflammatory condition. In some embodiments, the CRE, CRM, minimal/proximal promoter or promoter of the present invention is active in at least four, or at least three, or at least two, or at least one, heart cell types listed above, such as ventricular cardiomyocytes, atrial cardiomyocytes, cardiac fibroblasts, or endothelial cells (EC) in the heart, as well as peri-vascular cells and pacemaker cells.

[0728] In some embodiments, it may be desirable for the promoter to be active in a limited number of heart cell types, or in not more than one heart cell type.

[0729] In some embodiments, the CRE, CRM, minimal/proximal promoter or promoter of the present invention is active in specific subtypes of heart cell, such as for example, ventricular cardiomyocytes, atrial cardiomyocytes, cardiac fibroblasts, or endothelial cells (EC) in the heart, as well as peri-vascular cells and pacemaker cells.

[0730] Expression driven by a cardiac-specific promoter of the present invention in a desired heart tissue or heart cell may be for a period of at least 1 hour, 2 hours, 3 hours, 4 hours, 5 hours, 6 hours, 7 hours, 8 hours, 9 hours, 10 hours, 1 1 hours, 12 hours, 13 hours, 14 hours, 15 hours, 16 hours, 17 hours, 18 hours, 19 hours, 20 hours, 21 hours, 22 hours, 23 hours, 1 day, 2 days, 3 days, 4 days, 5 days, 6 days, 1 week, 8 days, 9 days, 10 days, 11 days, 12 days, 13 days, 2 weeks, 15 days, 16 days, 17 days, 18 days, 19 days, 20 days, 3 weeks, 22 days, 23 days, 24 days, 25 days, 26 days, 27 days, 28 days, 29 days, 30 days, 31 days, 1 month, 2 months, 3 months, 4 months, 5 months, 6 months, 7 months, 8 months, 9 months, 10 months, 11 months, 1 year, 13 months, 14 months, 15 months, 16 months, 17 months, 18 months, 19 months, 20 months, 21 months, 22 months, 23 months, 2 years, 3 years, 4 years, 5 years, 6 years, 7 years, 8 years, 9 years, 10 years, 15 years, 20 years, 30 years, 40 years, 50 years, 60 years, 70 years, 80 years, 90 years, 100 years. Expression driven by a promoter of the present invention in a desired tissue or cell may be for a period of more than 1 month, 2 months, 3 months, 4 months, 5 months, 6 months, 7 months, 8 months, 9 months, 10 months, 11 months, 1 year, 13 months, 14 months, 15 months, 16 months, 17 months, 18 months, 19 months, 20 months, 21 months, 22 months, 23 months, 2 years, 3 years, 4 years, 5 years, 6 years, 7 years, 8 years, 9 years, 10 years, 20 years, 30 years, 40 years, 50 years, 60 years, 70 years, 80 years, 90 years, 100 years. Expression may be for 1-5 hours, 1-12 hours, 1-2 days, 1-5 days, 1-2 weeks, 1-3 weeks, 1-4 weeks, 1-2 months, 1-4 months, 1-6 months, 2-6 months, 3-6 months, 3-9 months, 4-8 months, 6-12 months, 1-2 years, 1-5 years, 2-5 years, 3-6 years, 3-8 years, 4-8 years, 5-10 years, 10-15 years, 15-20 years, 20-30 years, 30-40 years, 40-50 years, 50-60 years, 60-70 years, 80-90 years or 90-100 years.

[0731] In a further aspect, there is provided a pharmaceutical composition comprising a rAAV vector comprising a synthetic cardiac-specific promoter, operatively linked to a transgene for the treatment of heart disease (e.g., but not limited to an inhibitor of PP1 and/or angiogenesis protein or peptide) according to the present invention. For example, rAAV vector particles may be prepared as pharmaceutical compositions for use in the methods of administration herein. It will be understood that such compositions necessarily comprise one or more active ingredients and, most often, a pharmaceutically acceptable excipient.

### VI.Muscle-Specific Promoters Active in Cardiac and Skeletal Muscle

[0732] In some embodiments, the rAAV vector comprises a nucleic acid encoding the therapeutic agent, e.g., inhibitor of PP1 or other agent, operatively linked to a muscle-specific promoter, wherein the muscle specific promoter is active in both skeletal muscle and cardiac muscle. Exemplary muscle-specific promoters are disclosed in Tables 5A, 5B, 6 and 7 herein. In some embodiments, the cardiac specific promoter is a synthetic cardiac specific promoter.

### Muscle-Specific Promoters That Are Active in Cardiac and Skeletal Muscle.

[0733] In some embodiments, the promoter is a synthetic muscle-specific promoter active in both skeletal and cardiac muscle. Examples of muscle-specific promoters active in both skeletal and cardiac muscle include SP0010, SP0020, SP0033, SP0038, SP0040, SP0042, SP0051, SP0057, SP0058, SP0061, SP0062, SP0064, SP0065, SP0066, SP0068, SP0070, SP0071, SP0076, SP0132, SP0133, SP0134, SP0136, SP0146, SP0147, SP0148, SP0150, SP0153, SP0155, SP0156, SP0157, SP0158, SP0159, SP0160, SP0161, SP0162, SP0163, SP0164, SP0165, SP0166, SP0169, SP0170, SP0171, SP0173, SP0228, SP0229, SP0230, SP0231, SP0232, SP0257, SP0262, SP0264, SP0265, SP0266, SP0267, SP0268, SP0270, SP0271, SP0279, SP0286, SP0305, SP0306, SP0307, SP0309, SP0310, SP0311, SP0312, SP0313, SP0314, SP0315, SP0316, SP0320, SP0322, SP0323, SP0324, SP0325, SP0326, SP0327, SP0328, SP0329, SP0330, SP0331, SP0332, SP0333, SP0334, SP0335, SP0336, SP0337, SP0338, SP0339, SP0340, SP0341, SP0343, SP0345, SP0346, SP0347, SP0348, SP0349, SP0350, SP0351, SP0352, SP0353, SP0354, SP0355, SP0356, SP0358, SP0359, SP0361, SP0362, SP0363, SP0364, SP0365, SP0366, SP0367, SP0368, SP0369, SP0370, SP0371, SP0372, SP0373, SP0374, SP0375, SP0376, SP0377, SP0378, SP0379, SP0380, SP0381, SP0382, SKM_14, SKM_18, SKM_20, SP0357, SP0437-SP0445, SP0447 and SP0453-SP0471,SP0473-SP0474. Examples of preferred synthetic muscle-specific promoters which are active in both skeletal and cardiac muscles are SP0057, SP0134, SP0173, SP0279, SP0286, SP0310, SP0316, SP0320 and SP0326.

[0734] In some embodiments, the synthetic muscle-specific promoter that is active in skeletal muscle and cardiac muscle comprises or consists of a sequence according to any one of SEQ ID Nos: 55, 56, 80-200, 290-329, or a functional variant thereof. In some embodiments the synthetic muscle-specific promoter that is active in skeletal muscle and cardiac muscle comprises or consists of a sequence which is at least 60%, 65%, 70%, 75%, 80%, 85%, 90%, 95%, 96%, 97%, 98% or 99% identical to any one of SEQ ID NOs 55, 56, 80-200, 290-329.

[0735] Table 5A shows the Sequence Identifier number of the nucleic acid sequences of exemplary muscle-specific promoters active in cardiac and skeletal muscle for use in the methods and composition as disclosed herein.

TABLE 5A

| NAME | SEQUENCE ID NO: | LENG TH | NAME | SEQUENCE ID NO: | LENGTH |
|---|---|---|---|---|---|
| SP0010 | SEQ ID NO: 80 | 298 | SP0333 | SEQ ID NO: 162 | 543 |
| SP0020 | SEQ ID NO: 81 | 354 | SP0334 | SEQ ID NO: 163 | 362 |
| SP0033 | SEQ ID NO: 82 | 270 | SP0335 | SEQ ID NO: 164 | 715 |
| SP0038 | SEQ ID NO: 83 | 286 | SP0336 | SEQ ID NO: 165 | 521 |
| SP0040 | SEQ ID NO: 84 | 315 | SP0337 | SEQ ID NO: 166 | 618 |
| SP0042 | SEQ ID NO: 85 | 421 | SP0338 | SEQ ID NO: 167 | 729 |
| SP0051 | SEQ ID NO: 86 | 524 | SP0339 | SEQ ID NO: 168 | 610 |
| SP0057 | SEQ ID NO: 87 | 601 | SP0340 | SEQ ID NO: 169 | 654 |
| SP0058 | SEQ ID NO: 88 | 531 | SP0341 | SEQ ID NO: 170 | 924 |
| SP0061 | SEQ ID NO: 89 | 528 | SP0343 | SEQ ID NO: 171 | 652 |
| SP0062 | SEQ ID NO: 90 | 454 | SP0345 | SEQ ID NO: 172 | 693 |
| SP0064 | SEQ ID NO: 91 | 484 | SP0346 | SEQ ID NO: 173 | 576 |
| SP0065 | SEQ ID NO: 92 | 465 | SP0347 | SEQ ID NO: 174 | 606 |
| SP0066 | SEQ ID NO: 93 | 484 | SP0348 | SEQ ID NO: 175 | 575 |
| SP0068 | SEQ ID NO: 94 | 448 | SP0349 | SEQ ID NO: 176 | 907 |
| SP0070 | SEQ ID NO: 95 | 444 | SP0350 | SEQ ID NO: 177 | 727 |
| SP0071 | SEQ ID NO: 96 | 404 | SP0351 | SEQ ID NO: 178 | 365 |
| SP0076 | SEQ ID NO: 97 | 438 | SP0352 | SEQ ID NO: 179 | 365 |
| SP0132 | SEQ ID NO: 98 | 538 | SP0353 | SEQ ID NO: 180 | 568 |
| SP0133 | SEQ ID NO: 99 | 528 | SP0354 | SEQ ID NO: 181 | 376 |
| SP0134 | SEQ ID NO: 100 | 655 | SP0355 | SEQ ID NO: 182 | 296 |
| SP0136 | SEQ ID NO: 101 | 588 | SP0356 | SEQ ID NO: 183 | 654 |
| SP0146 | SEQ ID NO: 102 | 660 | SP0358 | SEQ ID NO: 184 | 659 |
| SP0147 | SEQ ID NO: 103 | 806 | SP0359 | SEQ ID NO: 185 | 332 |
| SP0148 | SEQ ID NO: 104 | 938 | SP0361 | SEQ ID NO: 186 | 483 |
| SP0150 | SEQ ID NO: 105 | 814 | SP0362 | SEQ ID NO: 187 | 535 |
| SP0153 | SEQ ID NO: 106 | 418 | SP0363 | SEQ ID NO: 188 | 598 |
| SP0155 | SEQ ID NO: 107 | 508 | SP0364 | SEQ ID NO: 189 | 683 |
| SP0156 | SEQ ID NO: 108 | 718 | SP0365 | SEQ ID NO: 190 | 453 |
| SP0157 | SEQ ID NO: 109 | 202 | SP0366 | SEQ ID NO: 191 | 591 |
| SP0158 | SEQ ID NO: 110 | 705 | SP0367 | SEQ ID NO: 192 | 429 |
| SP0159 | SEQ ID NO: 111 | 615 | SP0368 | SEQ ID NO: 193 | 550 |
| SP0160 | SEQ ID NO: 112 | 586 | SP0369 | SEQ ID NO: 194 | 388 |
| SP0161 | SEQ ID NO: 113 | 740 | SP0370 | SEQ ID NO: 195 | 514 |
| SP0162 | SEQ ID NO: 114 | 650 | SP0371 | SEQ ID NO: 196 | 354 |
| SP0163 | SEQ ID NO: 115 | 621 | SP0372 | SEQ ID NO: 197 | 354 |
| SP0164 | SEQ ID NO: 116 | 764 | SP0373 | SEQ ID NO: 198 | 362 |
| SP0165 | SEQ ID NO: 117 | 480 | SP0374 | SEQ ID NO: 199 | 362 |
| SP0166 | SEQ ID NO: 118 | 894 | SP0375 | SEQ ID NO: 200 | 376 |
| SP0169 | SEQ ID NO: 119 | 248 | SP0376 | SEQ ID NO: 290 | 434 |
| SP0170 | SEQ ID NO: 120 | 482 | SP0377 | SEQ ID NO: 291 | 436 |
| SP0171 | SEQ ID NO: 121 | 534 | SP0378 | SEQ ID NO: 292 | 522 |
| SP0173 | SEQ ID NO: 122 | 728 | SP0379 | SEQ ID NO: 293 | 524 |
| SP0228 | SEQ ID NO: 123 | 885 | SP0380 | SEQ ID NO: 294 | 522 |
| SP0229 | SEQ ID NO: 124 | 1003 | SP0381 | SEQ ID NO: 295 | 524 |
| SP0230 | SEQ ID NO: 125 | 953 | SP0382 | SEQ ID NO: 296 | 524 |
| SP0231 | SEQ ID NO: 126 | 773 | SKM_14 | SEQ ID NO: 297 | 240 |
| SP0232 | SEQ ID NO: 127 | 683 | SKM_18 | SEQ ID NO: 55 | 242 |
| SP0257 | SEQ ID NO: 128 | 710 | SKM_20 | SEQ ID NO: 56 | 232 |
| SP0262 | SEQ ID NO: 129 | 943 | SP0357 | SEQ ID NO: 298 | 335 |
| SP0264 | SEQ ID NO: 130 | 724 | SP0437 | SEQ ID NO: 299 | 340 |
| SP0265 | SEQ ID NO: 131 | 822 | SP0438 | SEQ ID NO: 300 | 365 |
| SP0266 | SEQ ID NO: 132 | 1016 | SP0439 | SEQ ID NO: 301 | 365 |
| SP0267 | SEQ ID NO: 133 | 560 | SP0440 | SEQ ID NO: 302 | 585 |
| SP0268 | SEQ ID NO: 134 | 728 | SP0441 | SEQ ID NO: 303 | 546 |
| SP0270 | SEQ ID NO: 135 | 562 | SP0442 | SEQ ID NO: 304 | 585 |
| SP0271 | SEQ ID NO: 136 | 451 | SP0443 | SEQ ID NO: 305 | 328 |
| SP0279 | SEQ ID NO: 137 | 883 | SP0444 | SEQ ID NO: 306 | 328 |
| SP0286 | SEQ ID NO: 138 | 616 | SP0445 | SEQ ID NO: 307 | 436 |
| SP0305 | SEQ ID NO: 139 | 562 | SP0447 | SEQ ID NO: 308 | 291 |
| SP0306 | SEQ ID NO: 140 | 500 | SP0453 | SEQ ID NO: 309 | 761 |
| SP0307 | SEQ ID NO: 141 | 554 | SP0454 | SEQ ID NO: 310 | 720 |
| SP0309 | SEQ ID NO: 142 | 636 | SP0455 | SEQ ID NO: 311 | 551 |
| SP0310 | SEQ ID NO: 143 | 441 | SP0456 | SEQ ID NO: 312 | 688 |
| SP0311 | SEQ ID NO: 144 | 318 | SP0457 | SEQ ID NO: 313 | 621 |
| SP0312 | SEQ ID NO: 145 | 501 | SP0458 | SEQ ID NO: 314 | 759 |
| SP0313 | SEQ ID NO: 146 | 395 | SP0459 | SEQ ID NO: 315 | 837 |
| SP0314 | SEQ ID NO: 147 | 334 | SP0460 | SEQ ID NO: 316 | 298 |
| SP0315 | SEQ ID NO: 148 | 204 | SP0461 | SEQ ID NO: 317 | 365 |
| SP0316 | SEQ ID NO: 149 | 376 | SP0462 | SEQ ID NO: 318 | 356 |
| SP0320 | SEQ ID NO: 150 | 944 | SP0463 | SEQ ID NO: 319 | 772 |
| SP0322 | SEQ ID NO: 151 | 661 | SP0464 | SEQ ID NO: 320 | 837 |
| SP0323 | SEQ ID NO: 152 | 613 | SP0465 | SEQ ID NO: 321 | 772 |
| SP0324 | SEQ ID NO: 153 | 407 | SP0466 | SEQ ID NO: 322 | 764 |
| SP0325 | SEQ ID NO: 154 | 409 | SP0467 | SEQ ID NO: 323 | 671 |
| SP0326 | SEQ ID NO: 155 | 483 | SP0468 | SEQ ID NO: 324 | 671 |
| SP0327 | SEQ ID NO: 156 | 538 | SP0469 | SEQ ID NO: 325 | 506 |
| SP0328 | SEQ ID NO: 157 | 822 | SP0470 | SEQ ID NO: 326 | 365 |
| SP0329 | SEQ ID NO: 158 | 324 | SP0471 | SEQ ID NO: 327 | 624 |
| SP0330 | SEQ ID NO: 159 | 365 | SP0473 | SEQ ID NO: 328 | 718 |
| SP0331 | SEQ ID NO: 160 | 365 | SP0474 | SEQ ID NO: 329 | 465 |
| SP0332 | SEQ ID NO: 161 | 565 | | | |

[0736] Table 5B: CRE and minimal/proximal promoters of the embodiments of muscle-specific promoters active in cardiac and skeletal muscle shown in Table 1C

| | | | | | | |
|---|---|---|---|---|---|---|
| Promoter (SEQ ID NO) | CRE (SEQ ID NO) | CRE (SEQ ID NO) | CRE (SEQ ID NO) | CRE (SEQ ID NO) | Promoter element (SEQ ID NO) | 5′UTR and/or intron (SEQ ID NO) |
| SP0010 (80) | | | | | CRE0010 (264) | |
| SP0020 (81) | | | | CRE0020 (203) | CRE0053.2 SRL_mp (271) | |
| SP0033 (82) | | | | CRE0035 (208) | CRE0053.2 SRL_mp (271) | |
| SP0038 (83) | | | | CRE0031 (207) | CRE0053.2 SRL_mp (271) | |
| SP0040 (84) | | | | CRE0036 (209) | CRE0053.2 SRL_mp (271) | |
| SP0042 (85) | | | | CRE0036 (209) | CRE0037 (267) | |
| SP0051 (86) | | | | CRE0020 (203) | SKM_14 (277) | |
| SP0057 (87) | | | CRE0029 (206) | CRE0071 (216) | CRE0070 (42) | |
| SP0058 (88) | | | | CRE0016 (201) | CRE0005 (262) | |
| SP0061 (89) | | | | CRE0016 (201) | SKM_18 (55) | |
| SP0062 (90) | | | | CRE0018 (202) | SKM_18 (55) | |
| SP0064 (91) | | | | CRE0027 (205) | SKM_18 (55) | |
| SP0065 (92) | | | | CRE0028 (40) | SKM_18 (55) | |
| SP0066 (93) | | | | CRE0029 (206) | SKM_18 (55) | |
| SP0068 (94) | | | | CRE0035 (208) | SKM_18 (55) | |
| SP0070 (95) | | | | CRE0018 (202) | SKM_20 (56) | |
| SP0071 (96) | | | | CRE0025 (204) | SKM_20 (56) | |
| SP0076 (97) | | | | CRE0035 (208) | SKM_20 (56) | |
| SP0132 (98) | | | | CRE0020 (203) | SKM_18 (55) | |
| SP0133 (99) | | | | CRE0020 (203) | SKM_20 (56) | |
| SP0134 (100) | | | CRE0020 (203) | CRE0071 (216) | CRE0070 (42) | |
| SP0136 (101) | | | | CRE0020 (203) | CRE0010 (264) | |
| SP0146 (102) | | | | CRE0050 (211) | CRE0049 (270) | HBB intron (283) |
| SP0147 (103) | | | | CRE0020 (203) | CRE0049 (270) | HBB intron (283) |
| SP0148 (104) | | | | CRE0020 (203) | RSV (279) | |
| SP0150 (105) | | | | CRE0025 (204) | RSV (279) | |
| SP0153 (106) | | | | CRE0035 (208) | CRE0046 (268) | |
| SP0155 (107) | | CRE0035 (208) | 48 bp (224) | 48 bp (224) | CRE0046 (268) | |
| SP0156 (108) | | | CRE0035 (208) | CRE0020 (203) | SKM_14 (277) | |
| SP0157 (109) | | | | CRE0050 (211) | CRE0053.2 SRL_mp (271) | |
| SP0158 (110) | | | CRE0020 (203) | CRE0036 (209) | CRE0037 (267) | |
| SP0159 (111) | | | CRE0035 (208) | CRE0036 (209) | CRE0037 (267) | |
| SP0160 (112) | | | CRE0035 (208) | CRE0031 (207) | CRE0037 (267) | |
| SP0161 (113) | | | CRE0020 (203) | CRE0036 (209) | CRE0009 (263) | |
| SP0162 (114) | | | CRE0035 (208) | CRE0036 (209) | CRE0009 (263) | |
| SP0163 (115) | | | CRE0035 (208) | CRE0031 (207) | CRE0009 (263) | |
| SP0164 (116) | | | CRE0047 (210) | CRE0020 (203) | CRE0048 (269) | |
| SP0165 (117) | | | | CRE0047 (210) | CRE0048 (269) | |
| SP0166 (118) | | | | CRE0051 (212) | RSV (279) | |
| SP0169 (119) | | | | | SKM_18 (55) | |
| SP0170 (120) | | | | CRE0051 (212) | SKM_18 (55) | |
| SP0171 (121) | | | | CRE0010 (264) | SKM_18 (55) | |
| SP0173 (122) | | | CRE0010 (264) | CRE0035 (208) | SKM_18 (55) | |
| SP0228 (123) | | CRE0020 (203) | CRE0029 (206) | CRE0071 (216) | CRE0070 (42) | |
| SP0229 (124) | | CRE0020 (203) | CRE0029 (206) | CRE0071 (216) | SKM_18 (55) | |
| SP0230 (125) | | CRE0020 (203) | CRE0020 (203) | CRE0071 (216) | CRE0070 (42) | |
| SP0231 (126) | | | CRE0020 (203) | CRE0071 (216) | SKM_18 (55) | |
| SP0232 (127) | | | CRE0035 (208) | CRE0071 (216) | SKM_18 (55) | |
| SP0257 (128) | | | CRE0010 (264) | CRE0035 (208) | CRE0046 (268) | |
| SP0262 (129) | | | CRE0010 (264) | CRE0035 (208) | CRE0054 (272) | |
| SP0264 (130) | | | | CRE0035 (208) | CRE0010 (264) | |
| SP0265 (131) | | | | CRE0010 (264) | CRE0010_ALD OA (265) | |
| SP0266 (132) | | | CRE0010 (264) | CRE0035 (208) | CRE0010_ALD OA (265) | |
| SP0267 (133) | | | CRE0033 (41) | CRE0071 (216) | CRE0070 (42) | |
| SP0268 (134) | | | CRE0035 (208) | CRE0010 (264) | SKM_18 (55) | |
| SP0270 (135) | | | CRE0035 (208) | CRE0055 (273) | DES_mp_v1 (280) | |
| SP0271 (136) | | | | CRE0035 (208) | CRE0056 (274) | |
| SP0279 (137) | | | CRE0020 (203) | CRE0071 (216) | CRE0070.2 (275) | CMV-IE (65) |
| SP0286 (138) | | | | CRE0071 (216) | CRE0070.2 (275) | CMV-IE (65) |
| SP0305 (139) | | | CRE0010 (264) | CRE0035 (208) | CRE0053.2 SRL_mp (271) | |
| SP0306 (140) | | | CRE0029 (206) | CRE0035 (208) | CRE0053.2 SRL_mp (271) | |
| SP0307 (141) | | | CRE0020 (203) | CRE0035 (208) | CRE0053.2 SRL_mp (271) | |
| SP0309 (142) | | | CRE0035 (208) | CRE0035 (208) | SKM_18 (55) | |
| SP0310 (143) | | | | CRE0035 (208) | SKM_18 (55) | |
| SP0311 (144) | | | CRE0035 (208) | 48 bp (224) | CRE0053.2 SRL_mp (271) | |
| SP0312 (145) | | | CRE0047 (210) | CRE0035 (208) | CRE0053.2 SRL_mp (271) | |
| SP0313 (146) | | | CRE0035 (208) | CRE0059 (213) | CRE0053.2 SRL_mp (271) | |
| SP0314 (147) | | CRE0035 (208) | CRE0060 (214) | CRE0060 (214) | CRE0053.2 SRL_mp (271) | |
| SP0315 (148) | | | | CRE0050 (211) | CRE0053.2 SRL_mp (271) | |
| SP0316 (149) | | | | CRE0050 (211) | SKM_18 (55) | |
| SP0320 (150) | | | CRE0010 (264) | CRE0035 (208) | SKM_18 (55) | CMV-IE (65) |
| SP0322 (151) | | | CRE0069 (215) | CRE0051 (212) | SKM_18 (55) | |
| SP0323 (152) | | | CRE0069.2 (242) | CRE0051 (212) | SKM_18 (55) | |
| SP0324 (153) | | | | CRE0069 (215) | SKM_14 (277) | |
| SP0325 (154) | | | | CRE0069 (215) | SKM_18 (55) | |
| SP0326 (155) | | | | CRE0071 (216) | SKM_18 (55) | |
| SP0327 (156) | | | CRE0069 (215) | CRE0071 (216) | CRE0070 (42) | |
| SP0328 (157) | | CRE0020 (203) | CRE0069 (215) | CRE0071 (216) | CRE0070 (42) | |
| SP0329 (158) | | | | CRE0071.13 (243) | CRE0070 (42) | |
| SP0330 (159) | | | | CRE0071.3 (43) | CRE0070 (42) | |
| SP0331 (160) | | | | CRE0071.4 (236) | CRE0070 (42) | |
| SP0332 (161) | | | CRE0035 (208) | CRE0071 (216) | CRE0070 (42) | |
| SP0333 (162) | | | | CRE0035 (208) | CRE0072 (276) | |
| SP0334 (163) | | | | CRE0035 (208) | DES_mp_v1 (280) | |
| SP0335 (164) | | | CRE0035 (208) | CRE0055 (273) | CRE0034 (266) | |
| SP0336 (165) | | | | CRE0055 (273) | CRE0034 (266) | |
| SP0337 (166) | | | CRE0035 (208) | CRE0055 (273) | CRE0046 (268) | |
| SP0338 (167) | | CRE0069 (215) | CRE0035 (208) | CRE0055 (273) | DES_mp_v1 (280) | |
| SP0339 (168) | | CRE0035 (208) | 48 bp (224) | CRE0055 (273) | DES_mp_v1 (280) | |
| SP0340 (169) | | | CRE0035 (208) | CRE0046 (268) | SKM_18 (55) | |
| SP0341 (170) | | | CRE0035 (208) | CRE0055 (273) | CRE0010_ALD OA (265) | |
| SP0343 (171) | | | | CRE0035 (208) | SKM_18.2 (278) | CMV-IE (65) |
| SP0345 (172) | | | CRE0020 (203) | CRE0071 (216) | DES_mp_v1 (280) | |
| SP0346 (173) | | | CRE0069 (215) | CRE0071 (216) | DES_mp_v1 (280) | |
| SP0347 (174) | | | CRE0029 (206) | CRE0050 (211) | SKM_18 (55) | |
| SP0348 (175) | | | CRE0029.2 (241) | CRE0050 (211) | SKM_18 (55) | |
| SP0349 (176) | | CRE0029 (206) | CRE0035 (208) | CRE0071 (216) | SKM_18 (55) | |
| SP0350 (177) | | CRE0020 (203) | 72 bp (246) | CRE0071 (216) | CRE0070 (42) | |
| SP0351 (178) | | | | CRE0071.14 (244) | CRE0070 (42) | |
| SP0352 (179) | | | | CRE0071.15 (245) | CRE0070 (42) | |
| SP0353 (180) | | | | CRE0073 (218) | CRE0046 (268) | |
| SP0354 (181) | | | | CRE0074 (219) | CRE0046 (268) | |
| SP0355 (182) | | | | CRE0075 (220) | CRE0046 (268) | |
| SP0356 (183) | | | | CRE0076 (221) | CRE0046 (268) | |
| SP0358 (184) | | | | CRE0078 (222) | CRE0046 (268) | |
| SP0359 (185) | | | | CRE0079 (223) | CRE0046 (268) | |
| SP0361 (186) | | | | CRE0071.14 (244) | SKM_18 (55) | |
| SP0362(187) | | | CRE0069 (215) | CRE0071.5 (217) | DES_mp_v1 (280) | |
| SP0363 (188) | | | CRE0029 (206) | CRE0071.5 (217) | DES_mp_v1 (280) | |
| SP0364 (189) | | | CRE0029 (206) | CRE0071 (216) | CRE0046 (268) | |
| SP0365 (190) | | | | CRE0071 (216) | CRE0046 (268) | |
| SP0366 (191) | | | CRE0079 (223) | CRE0071 (216) | SKM_18 (55) | |
| SP0367 (192) | | | | CRE0079 (223) | CRE0034 (266) | |
| SP0368 (193) | | | CRE0079 (223) | CRE0035 (208) | SKM_18 (55) | |
| SP0369 (194) | | | | CRE0071.6 (237) | CRE0070 (42) | |
| SP0370 (195) | | | | CRE0071.7 (225) | CRE0070 (42) | |
| SP0371 (196) | | | | CRE0071.8 (238) | CRE0070 (42) | |
| SP0372 (197) | | | | CRE0071.9 (239) | CRE0070 (42) | |
| SP0373 (198) | | | | CRE0071.10 (226) | CRE0070 (42) | |
| SP0374 (199) | | | | CRE0071.11 (227) | CRE0070 (42) | |
| SP0375 (200) | | | | CRE0071.12 (228) | CRE0070 (42) | |
| SP0376 (290) | | CRE0035 (208) | HTMB ev_4 (282) | DES_MT_enha ncer_48bp_v2 (229) | DES_mp_v1 (280) | |
| SP0377 (291) | | CRE0035 (208) | HTMB ev_4 (282) | DES_MT_enha ncer_48bp_v3 (230) | DES_mp_v1 (280) | |
| SP0378 (292) | | | CRE0020 (203) | DES_MT_enha ncer_72bp_v2 (231) | DES_mp_v1 (280) | |
| SP0379 (293) | | | CRE0020 (203) | DES_MT_enha ncer_72bp_v3 (232) | DES_mp_v1 (280) | |
| SP0380 (294) | | | CRE0020 (203) | DES_MT_enha ncer_72bp_v4 (233) | DES_mp_v1 (280) | |
| SP0381 (295) | | | CRE0020 (203) | DES_MT_enha ncer_72bp_v5 (234) | DES_mp_v1 (280) | |
| SP0382 (296) | | | CRE0020 (203) | DES_MT_enha ncer_72bp_v6 (235) | DES_mp_v1 (280) | |
| SKM_14 (297) | | | | | SKM_14 (277) | |
| SKM_18 (55) | | | | | SKM_18 (55) | |
| SKM_20 (56) | | | | | SKM_20 (56) | |
| SP0357 (298) | | | | CRE0077 (240) | CRE0046 (268) | |
| SP0437 (299) | | | | CRE0071.16 (249) | CRE0070 (42) | |
| SP0438 (300) | | | | CRE0071.17 (250) | CRE0070 (42) | |
| SP0439 (301) | | | | CRE0071.18 (251) | CRE0070 (42) | |
| SP0440 (302) | | | CRE0020 (203) | CRE0071.13 (243) | CRE0070 (42) | |
| SP0441 (303) | | | CRE0020 (203) | CRE0071.19 (252) | CRE0070 (42) | |
| SP0442 (304) | | | CRE0020 (203) | CRE0071.5 (217) | CRE0070 (42) | |
| SP0443 (305) | | | | CRE0071.20 (253) | CRE0070 (42) | |
| SP0444 (306) | | | | CRE0071.21 (254) | CRE0070 (42) | |
| SP0445 (307) | | | | CRE0071.5 (217) | SKM_18 (55) | |
| SP0447 (308) | | | | CRE0071.22 (255) | CRE0070 (42) | |
| SP0453 (309) | | | CRE0020 (203) | CRE0071 (216) | SKM_18 (55) | |
| SP0454 (310) | | | CRE0020 (203) | CRE0071.5 (217) | SKM_18 (55) | |
| SP0455 (311) | | CRE0093 (247) | CRE0094 (248) | CRE0071 (216) | CRE0070 (42) | |
| SP0456 (312) | | CRE0093 (247) | CRE0094 (248) | CRE0071 (216) | SKM_18 (55) | |
| SP0457 (313) | CREO 093 (247) | CNTRL_001 (259) | CRE0094 (248) | CRE0071 (216) | CRE0070 (42) | |
| SP0458 (314) | | | CRE0020 (203) | CRE0071 (216) | SKM_14 (277) | |
| SP0459 (315) | | | CRE0020 (203) | CRE0071 (216) | CRE0049 (270) | |
| SP0460 (316) | | | | CRE0071.23 (256) | CRE0070 (42) | |
| SP0461 (317) | | | CRE0071.23 (256) | CNTRL_001 (67 bp) (257) | CRE0070 (42) | |
| SP0462 (318) | | | CRE0060 (214) | CRE0071.13 (243) | CRE0070 (42) | |
| SP0463 (319) | | | CRE0020 (203) | CRE0071 (216) | CRE0099 (281) | |
| SP0464 (320) | | | CRE0071 (216) | CRE0020 (203) | CRE0049 (270) | |
| SP0465 (321) | | | CRE0071 (216) | CRE0020 (203) | CRE0099 (281) | |
| SP0466 (322) | | CRE0071 (216) | CRE0093 (247) | CRE0094 (248) | CRE0049 (270) | |
| SP0467 (323) | | | CRE0035 (208) | CRE0071 (216) | SKM_18 (55) | |
| SP0468 (324) | | | CRE0071 (216) | CRE0035 (208) | SKM_18 (55) | |
| SP0469 (325) | | CRE0093.2 (260) | CRE0094.2 (261) | CRE0071 (216) | CRE0070 (42) | |
| SP0470 (326) | | | | CRE0071.24 (258) | CRE0070 (42) | |
| SP0471 (327) | | | CRE0071 (216) | CRE0020 (203) | CRE0070 (42) | |
| SP0473 (328) | | | CRE0020 (203) | CRE0071.5 (217) | SKM_14 (277) | |
| SP0474 (329) | | CRE0093.2 (260) | CRE0094.2 (261) | CRE0071.5 (217) | CRE0070 (42) | |

[0737] Table 13A shows the sequence identifier numbers for shortened nucleic acid sequences of exemplary muscle-specific promoters active in cardiac and skeletal muscle for use in the methods and composition as disclosed herein.

| NAME and SEQ ID NO: | LENGTH |
|---|---|
| SP0502 (SEQ ID NO: 336) | 251 |
| SP0515 (SEQ ID NO: 337) | 235 |
| SP0521 (SEQ ID NO: 338) | 263 |
| SP4169 (SEQ ID NO: 339) | 287 |
| SP0522 (SEQ ID NO: 340) | 237 |
| SP0523 (SEQ ID NO: 341) | 221 |
| SP0524 (SEQ ID NO: 342) | 249 |

[0738] Table 13B: CRE and minimal/proximal promoters of the embodiments of shortened muscle-specific promoters active in cardiac and skeletal muscle shown in Table 13A.

| | | | | | | |
|---|---|---|---|---|---|---|
| Promoter (SEQ ID NO) | CRE (SEQ ID NO) | CRE (SEQ ID NO) | CRE (SEQ ID NO) | CRE (SEQ ID NO) | Promoter element (SEQ ID NO) | 5′UTR and/or intron (SEQ ID NO) |
| SP0502 (SEQ ID NO: 336) | | | | CRE0050 (SEQ ID NO: 211) | CRE0053 (SEQ ID NO: 344) | |
| SP0515 (SEQ ID NO: 337) | | | | CRE0050 (SEQ ID NO: 211) | BG mp (SEQ ID NO: 345) | |
| SP0521 (SEQ ID NO: 338) | | | | CRE0050 (SEQ ID NO: 211) | SCPI (SEQ ID NO: 346) | |
| SP4169 (SEQ ID NO: 339) | | | | CRE0050 (SEQ ID NO: 211) | CRE0070 (SEQ ID NO: 42) | |
| SP0522 (SEQ ID NO: 340) | | | | CRE0145 (SEQ ID NO: 343) | CRE0053 (SEQ ID NO: 344) | |
| SP0523 (SEQ ID NO: 341) | | | | CRE0145 (SEQ ID NO: 343) | BG mp (SEQ ID NO: 345) | |
| SP0524 (SEQ ID NO: 342) | | | | CRE0145 (SEQ ID NO: 343) | SCPI (SEQ ID NO: 346) | |

### VII. Functional Variants of Muscle-Specific Promoters That Are Active in Cardiac and Skeletal Muscle:

### SP0057 and Variants Thereof

[0739] In some embodiments, the promoter is a synthetic muscle-specific promoter comprising a combination of the cis-regulatory elements CRE0029 and CRE0071, or functional variants thereof. Typically, the CREs are operably linked to a promoter element. In some preferred embodiments, the muscle-specific promoter comprises said CREs, or functional variants thereof, in the order CRE0029, CRE0071, and then the promoter element (order is given in an upstream to downstream direction, as is conventional in the art). In some preferred embodiments, the muscle-specific promoter comprises said CREs, or functional variants thereof, in the order CRE0071, CRE0029 and then the promoter element.

[0740] The promoter element can be any suitable proximal promoter or minimal promoter. In some embodiments, the promoter element is a minimal promoter. Where the promoter is a proximal promoter, it is generally preferred that the proximal promoter is muscle-specific.

[0741] In some preferred embodiments, the promoter element is CRE0070 or a functional variant thereof. CRE0070 is a muscle-specific proximal promoter.

[0742] Thus, in one embodiment the promoter comprises the following regulatory elements: CRE0029, CRE0071 and CRE0070, or functional variants thereof.

[0743] CRE0029 has a sequence according to SEQ ID NO: 206. Functional variants thereof may have a sequence that is at least 60%, 65%, 70%, 75%, 80%, 85%, 90%, 95%, 96%, 97%, 98%, or 99% identical thereto.

[0744] Functional variants of CRE0029 are regulatory elements with sequences which vary from CRE0029, but which substantially retain activity as muscle-specific CREs. It will be appreciated by the skilled person that it is possible to vary the sequence of a CRE while retaining its ability to bind to the requisite transcription factors (TFs) and enhance expression. A functional variant can comprise substitutions, deletions and/or insertions compared to a reference CRE, provided they do not render the CRE substantially non-functional.

[0745] In some embodiments, a functional variant of CRE0029 can be viewed as a CRE which, when substituted in place of CRE0029 in a promoter, substantially retains its activity. For example, a muscle-specific promoter which comprises a functional variant of CRE0029 substituted in place of CRE0029 preferably retains 80% of its activity, more preferably 90% of its activity, more preferably 95% of its activity, and yet more preferably 100% of its activity. For example, considering promoter SP0057 as an example, CRE0029 in SP0057 can be replaced with a functional variant of CRE0029, and the promoter substantially retains its activity. Retention of activity can be assessed by comparing expression of a suitable reporter under the control of the reference promoter with an otherwise identical promoter comprising the substituted CRE under equivalent conditions.

[0746] It will be noted that CRE0029 or functional variant thereof can be provided on either strand of a double stranded polynucleotide and can be provided in either orientation. As such, complementary and reverse complementary sequences of SEQ ID NO: 206 or a functional variant thereof fall within the scope of the invention. Single stranded nucleic acids comprising the sequence according to SEQ ID NO: 206 or a functional variant thereof also fall within the scope of the invention.

[0747] CRE0071 has a sequence according to SEQ ID NO: 216. Functional variants thereof may have a sequence that is at least 60%, 65%, 70%, 75%, 80%, 85%, 90%, 95%, 96%, 97%, 98%, or 99% identical thereto.

[0748] Functional variants of CRE0071 are regulatory elements with sequences which vary from CRE0071, but which substantially retain activity as muscle-specific CREs. It will be appreciated by the skilled person that it is possible to vary the sequence of a CRE while retaining its ability to bind to the requisite transcription factors (TFs) and enhance expression. A functional variant can comprise substitutions, deletions and/or insertions compared to a reference CRE, provided they do not render the CRE substantially non-functional.

[0749] In some embodiments, a functional variant of CRE0071 can be viewed as a CRE which, when substituted in place of CRE0071 in a promoter, substantially retains its activity. For example, a muscle-specific promoter which comprises a functional variant of CRE0029 substituted in place of CRE0071 preferably retains 80% of its activity, more preferably 90% of its activity, more preferably 95% of its activity, and yet more preferably 100% of its activity. For example, considering promoter SP0057 as an example, CRE0071 in SP0057 can be replaced with a functional variant of CRE0071, and the promoter substantially retains its activity. Retention of activity can be assessed by comparing expression of a suitable reporter under the control of the reference promoter with an otherwise identical promoter comprising the substituted CRE under equivalent conditions.

[0750] It will be noted that CRE0071 or functional variant thereof can be provided on either strand of a double stranded polynucleotide and can be provided in either orientation. As such, complementary and reverse complementary sequences of SEQ ID NO: 216 or a functional variant thereof fall within the scope of the invention. Single stranded nucleic acids comprising the sequence according to SEQ ID NO: 216 or a functional variant thereof also fall within the scope of the invention.

[0751] The sequence of CRE0070 and variants thereof are set out elsewhere herein.

[0752] In some embodiments the muscle-specific promoter comprises a sequence according to SEQ ID NO: X, or a functional variant thereof. In some embodiments, functional variants may have a sequence that is at least 60%, 65%, 70%, 75%, 80%, 85%, 90%, 95%, 96%, 97%, 98%, or 99% identical thereto. The promoter having a sequence according to SEQ ID NO: X is referred to as SP0057. The SP0057 promoter is particularly preferred in some embodiments. This promoter has been found to be very specific for muscle, which is advantageous in some circumstances.

### SP0134 and Variants Thereof

[0753] In some embodiments, the promoter is a synthetic muscle-specific promoter comprising a combination of the cis-regulatory elements CRE0020 and CRE0071, or functional variants thereof. Typically the CREs are operably linked to a promoter element. In some preferred embodiments, the muscle-specific promoter comprises said CREs, or functional variants thereof, in the order CRE0020, CRE0071, and then the promoter element (order is given in an upstream to downstream direction, as is conventional in the art). In some embodiments, the muscle-specific promoter comprises said CREs, or functional variants thereof, in the order CRE0071, CRE0020 and then the promoter element

[0754] The promoter element can be any suitable proximal promoter or minimal promoter. In some embodiments, the promoter element is a minimal promoter. Where the promoter is a proximal promoter, it is generally preferred that the proximal promoter is muscle-specific.

[0755] In some preferred embodiments, the promoter element is CRE0070 or a functional variant thereof. CRE0070 is a muscle-specific proximal promoter.

[0756] Thus, in one embodiment the promoter comprises the following regulatory elements: CRE0020, CRE0071 and CRE0070, or functional variants thereof.

[0757] CRE0020 has a sequence according to SEQ ID NO: 203. Functional variants thereof may have a sequence that is at least 60%, 65%, 70%, 75%, 80%, 85%, 90%, 95%, 96%, 97%, 98%, or 99% identical thereto.

[0758] Functional variants of CRE0020 are regulatory elements with sequences which vary from CRE0020, but which substantially retain activity as muscle-specific CREs. It will be appreciated by the skilled person that it is possible to vary the sequence of a CRE while retaining its ability to bind to the requisite transcription factors (TFs) and enhance expression. A functional variant can comprise substitutions, deletions and/or insertions compared to a reference CRE, provided they do not render the CRE substantially non-functional.

[0759] In some embodiments, a functional variant of CRE0020 can be viewed as a CRE which, when substituted in place of CRE0020 in a promoter, substantially retains its activity. For example, a skeletal muscle-specific promoter which comprises a functional variant of CRE0020 substituted in place of CRE0020 preferably retains 80% of its activity, more preferably 90% of its activity, more preferably 95% of its activity, and yet more preferably 100% of its activity. For example, considering promoter SP0227 as an example, CRE0020 in SP0227 can be replaced with a functional variant of CRE0020, and the promoter substantially retains its activity. Retention of activity can be assessed by comparing expression of a suitable reporter under the control of the reference promoter with an otherwise identical promoter comprising the substituted CRE under equivalent conditions.

[0760] It will be noted that CRE0020 or functional variant thereof can be provided on either strand of a double stranded polynucleotide and can be provided in either orientation. As such, complementary and reverse complementary sequences of SEQ ID NO: 203 or a functional variant thereof fall within the scope of the invention. Single stranded nucleic acids comprising the sequence according to SEQ ID NO: 203 or a functional variant thereof also fall within the scope of the invention.

[0761] In some embodiments, the CRE0020 or a functional variant thereof, has a length of 300 or fewer nucleotides, 250 or fewer nucleotides, 200 or fewer nucleotides, 150 or fewer nucleotides, 125 or fewer nucleotides, or 100 or fewer nucleotides.

[0762] The sequence of CRE0071 and variants thereof are set out above.

[0763] The sequence of CRE0070 and variants thereof are set out elsewhere herein.

[0764] In some embodiments the muscle-specific promoter comprises a sequence according to SEQ ID NO: 100, or a functional variant thereof. In some embodiments, functional variants may have a sequence that is at least 60%, 65%, 70%, 75%, 80%, 85%, 90%, 95%, 96%, 97%, 98%, or 99% identical thereto. The promoter having a sequence according to SEQ ID NO: 100 is referred to as SP0134. The SP0134 promoter is particularly preferred in some embodiments. This promoter has been found to be very specific for muscle, which is advantageous in some circumstances.

### SP0173 and Variants Thereof

[0765] In some embodiments, the promoter is a synthetic muscle-specific promoter comprising a combination of muscle specific proximal promoter CRE0010 and cis-regulatory element CRE0035, or functional variants thereof. Typically, muscle specific proximal promoter CRE0010 and cis-regulatory element CRE0035 are operably linked to a further promoter element. In some preferred embodiments, the synthetic muscle-specific promoter comprises said proximal promoter and CRE, or functional variants thereof, in the order CRE0010, CRE0035 and then the further promoter element (order is given in an upstream to downstream direction, as is conventional in the art). In some embodiments, the synthetic muscle-specific promoter comprises said proximal promoter and CRE, or functional variants thereof, in the order CRE0035, CRE0010 and then the further promoter element.

[0766] The promoter element can be any suitable proximal promoter or minimal promoter. In some embodiments, the promoter element is a minimal promoter. Where the promoter is a proximal promoter, it is generally preferred that the proximal promoter is muscle-specific.

[0767] In some preferred embodiments, the promoter element is SKM_18 or a functional variant thereof. SKM_18 is a muscle-specific proximal promoter.

[0768] Thus, in one embodiment the promoter comprises the following regulatory elements: CRE0010, CRE0035 and SKM _18, or functional variants thereof.

[0769] CRE0010 has a sequence according to SEQ ID NO: 264. Functional variants thereof may have a sequence that is at least 60%, 65%, 70%, 75%, 80%, 85%, 90%, 95%, 96%, 97%, 98%, or 99% identical thereto.

[0770] As discussed above, functional variants of CRE0010 substantially retain the ability of CRE0010 to act as a muscle-specific promoter element. For example, when a functional variant of CRE0010 is substituted into muscle-specific promoter SP0320, the modified promoter retains at least 80% of its activity, more preferably at least 90% of its activity, more preferably at least 95% of its activity, and yet more preferably 100% of the activity of SP0320. Suitably the functional variant of CRE0010 comprises a sequence which is at least 70%, 80%, 90%, 95% or 99% identity to SEQ ID NO: 264.

[0771] In some preferred embodiments, a promoter element comprising or consisting of CRE0010 or a functional variant thereof has a length of 400 or fewer nucleotides, 300 or fewer nucleotides, 250 or fewer nucleotides, 200 or fewer nucleotides, 150 or fewer nucleotides, 125 or fewer nucleotides, 110 or fewer nucleotides, or 95 or fewer nucleotides.

[0772] CRE0035 has a sequence according to SEQ ID NO: 208. Functional variants thereof may have a sequence that is at least 60%, 65%, 70%, 75%, 80%, 85%, 90%, 95%, 96%, 97%, 98%, or 99% identical thereto.

[0773] Functional variants of CRE0035 are regulatory elements with sequences which vary from CRE0035, but which substantially retain activity as muscle-specific CREs. It will be appreciated by the skilled person that it is possible to vary the sequence of a CRE while retaining its ability to bind to the requisite transcription factors (TFs) and enhance expression. A functional variant can comprise substitutions, deletions and/or insertions compared to a reference CRE, provided they do not render the CRE substantially non-functional.

[0774] In some embodiments, a functional variant of CRE0035 can be viewed as a CRE which, when substituted in place of CRE0035 in a promoter, substantially retains its activity. For example, a muscle-specific promoter which comprises a functional variant of CRE0035 substituted in place of CRE0035 preferably retains 80% of its activity, more preferably 90% of its activity, more preferably 95% of its activity, and yet more preferably 100% of its activity. For example, considering promoter SP0173 as an example, CRE0035 in SP0173 can be replaced with a functional variant of CRE0035, and the promoter substantially retains its activity. Retention of activity can be assessed by comparing expression of a suitable reporter under the control of the reference promoter with an otherwise identical promoter comprising the substituted CRE under equivalent conditions.

[0775] It will be noted that CRE0035 or functional variant thereof can be provided on either strand of a double stranded polynucleotide and can be provided in either orientation. As such, complementary and reverse complementary sequences of SEQ ID NO: 208 or a functional variant thereof fall within the scope of the invention. Single stranded nucleic acids comprising the sequence according to SEQ ID NO: 208 or a functional variant thereof also fall within the scope of the invention.

[0776] The sequence of SKM_18 (SEQ ID NO: 55) and variants thereof are set out elsewhere herein.

[0777] In some embodiments the muscle-specific promoter comprises a sequence according to SEQ ID NO: 122, or a functional variant thereof. In some embodiments, functional variants may have a sequence that is at least 60%, 65%, 70%, 75%, 80%, 85%, 90%, 95%, 96%, 97%, 98%, or 99% identical thereto. The promoter having a sequence according to SEQ ID NO: 122 is referred to as SP0173. The SP0173 promoter is particularly preferred in some embodiments. This promoter has been found to be very specific for muscle, which is advantageous in some circumstances.

### SP0279 and Variants Thereof

[0778] In some embodiments, the promoter is a synthetic muscle-specific promoter comprising a combination of the cis-regulatory elements CRE0020 and CRE0071, or functional variants thereof. Typically the CREs are operably linked to a promoter element. In some preferred embodiments, the muscle-specific promoter comprises said CREs, or functional variants thereof, in the order CRE0020, CRE0071, and then the promoter element (order is given in an upstream to downstream direction, as is conventional in the art). In some preferred embodiments, the muscle-specific promoter comprises said CREs, or functional variants thereof, in the order CRE0071, CRE0020 and then the promoter element. In some preferred embodiments, the muscle-specific promoter comprises said CREs, or functional variants thereof, in the order CRE0020, CRE0071, the promoter element and the CMV-IE 5′UTR and Intron (order is given in an upstream to downstream direction, as is conventional in the art).

[0779] The promoter element can be any suitable proximal promoter or minimal promoter. In some embodiments, the promoter element is a minimal promoter. Where the promoter is a proximal promoter, it is generally preferred that the proximal promoter is muscle-specific.

[0780] In some preferred embodiments, the promoter element is CRE0070 or a functional variant thereof. CRE0070 is a muscle-specific proximal promoter.

[0781] Thus, in one embodiment the promoter comprises the following regulatory elements: CRE0020, CRE0071, CRE0070 and CMV-IE 5′UTR and intron, or functional variants thereof.

[0782] The sequence of CRE0020 and variants thereof are set out above.

[0783] The sequence of CRE0071 and variants thereof are set out above.

[0784] The sequence of CRE0070 and variants thereof are set out elsewhere herein.

[0785] The sequence of CMV-IE 5′UTR and intron and variants thereof are set out elsewhere herein.

[0786] In some embodiments the muscle-specific promoter comprises a sequence according to SEQ ID NO: 137, or a functional variant thereof. In some embodiments, functional variants may have a sequence that is at least 60%, 65%, 70%, 75%, 80%, 85%, 90%, 95%, 96%, 97%, 98%, or 99% identical thereto. The promoter having a sequence according to SEQ ID NO: 137 is referred to as SP0279. The SP0279 promoter is particularly preferred in some embodiments. This promoter has been found to be very specific for muscle, which is advantageous in some circumstances.

### SP0286 and Variants Thereof

[0787] In some embodiments, the promoter is a synthetic muscle-specific promoter comprising CRE0071 operably linked to a promoter element. In some preferred embodiments, the synthetic muscle-specific promoter comprises CRE0071 immediately upstream of the promoter element. In some preferred embodiments, the synthetic muscle-specific promoter comprises CRE0071 immediately upstream of the promoter element and CMV-IE 5′UTR and intron.

[0788] The promoter element can be any suitable proximal or minimal promoter. In some embodiments, the promoter element is a minimal promoter. Where the promoter is a proximal promoter, it is generally preferred that the proximal promoter is muscle- specific.

[0789] In some preferred embodiments the promoter element is CRE0070 or functional variant thereof. CRE0070 is a muscle-specific proximal promoter.

[0790] In some embodiments the synthetic muscle-specific promoter comprises the following elements (or functional variants thereof): CRE0071, CRE0070 and then CMV-IE 5′UTR and intron.

[0791] The sequence of CRE0071 and variants thereof are set out above.

[0792] The sequence of CRE0070 and variants thereof are set out elsewhere herein.

[0793] The sequence of CMV-IE 5′UTR and intron and variants thereof are set out elsewhere herein.

[0794] In some embodiments the muscle-specific promoter comprises a sequence according to SEQ ID NO: 138, or a functional variant thereof. In some embodiments, functional variants may have a sequence that is at least 60%, 65%, 70%, 75%, 80%, 85%, 90%, 95%, 96%, 97%, 98%, or 99% identical thereto. The promoter having a sequence according to SEQ ID NO: 138 is referred to as SP0286. The SP0286 promoter is particularly preferred in some embodiments. This promoter has been found to be very specific for muscle, which is advantageous in some circumstances.

### SP0310 and Variants Thereof

[0795] In some embodiments, the promoter is a synthetic muscle-specific promoter comprising CRE0035 operably linked to a promoter element. In some preferred embodiments, the synthetic muscle-specific promoter comprises CRE0035 immediately upstream of the promoter element.

[0796] The promoter element can be any suitable proximal or minimal promoter. In some embodiments, the promoter element is a minimal promoter. Where the promoter is a proximal promoter, it is generally preferred that the proximal promoter is muscle- specific.

[0797] In some preferred embodiments the promoter element is SKM_18 or functional variant thereof. SKM_18 is a muscle-specific proximal promoter.

[0798] In some embodiments the cardiac muscle-specific promoter comprises the following elements (or functional variants thereof): CRE0035 and then SKM_18.

[0799] The sequence of CRE0035 and variants thereof are set out above.

[0800] The sequence of SKM_18 and variants thereof are set out elsewhere herein.

[0801] In some embodiments the muscle-specific promoter comprises a sequence according to SEQ ID NO: 143, or a functional variant thereof. In some embodiments, functional variants may have a sequence that is at least 60%, 65%, 70%, 75%, 80%, 85%, 90%, 95%, 96%, 97%, 98%, or 99% identical thereto. The promoter having a sequence according to SEQ ID NO: 143 is referred to as SP0310. The SP0310 promoter is particularly preferred in some embodiments. This promoter has been found to be very specific for muscle, which is advantageous in some circumstances.

### SP0316 and Variants Thereof

[0802] In some embodiments, the promoter is a synthetic muscle-specific promoter comprising CRE0050 operably linked to a promoter element. In some preferred embodiments, the synthetic muscle-specific promoter comprises CRE0050 immediately upstream of the promoter element.

[0803] The promoter element can be any suitable proximal or minimal promoter. In some embodiments, the promoter element is a minimal promoter. Where the promoter is a proximal promoter, it is generally preferred that the proximal promoter is muscle- specific.

[0804] In some preferred embodiments the promoter element is SKM_18 or functional variant thereof. SKM_18 is a muscle-specific proximal promoter.

[0805] In some embodiments the cardiac muscle-specific promoter comprises the following elements (or functional variants thereof): CRE0050 and then SKM_18.

[0806] CRE0050 has a sequence according to SEQ ID NO: 211. Functional variants thereof may have a sequence that is at least 60%, 65%, 70%, 75%, 80%, 85%, 90%, 95%, 96%, 97%, 98%, or 99% identical thereto.

[0807] Functional variants of CRE0050 are regulatory elements with sequences which vary from CRE0050, but which substantially retain activity as muscle-specific CREs. It will be appreciated by the skilled person that it is possible to vary the sequence of a CRE while retaining its ability to bind to the requisite transcription factors (TFs) and enhance expression. A functional variant can comprise substitutions, deletions and/or insertions compared to a reference CRE, provided they do not render the CRE substantially non-functional.

[0808] In some embodiments, a functional variant of CRE0050 can be viewed as a CRE which, when substituted in place of CRE0050 in a promoter, substantially retains its activity. For example, a muscle-specific promoter which comprises a functional variant of CRE0035 substituted in place of CRE0050 preferably retains 80% of its activity, more preferably 90% of its activity, more preferably 95% of its activity, and yet more preferably 100% of its activity. For example, considering promoter SP0316 as an example, CRE0050 in SP0316 can be replaced with a functional variant of CRE0050, and the promoter substantially retains its activity. Retention of activity can be assessed by comparing expression of a suitable reporter under the control of the reference promoter with an otherwise identical promoter comprising the substituted CRE under equivalent conditions.

[0809] It will be noted that CRE0050 or functional variant thereof can be provided on either strand of a double stranded polynucleotide and can be provided in either orientation. As such, complementary and reverse complementary sequences of SEQ ID NO: 211 or a functional variant thereof fall within the scope of the invention. Single stranded nucleic acids comprising the sequence according to SEQ ID NO: 211 or a functional variant thereof also fall within the scope of the invention.

[0810] The sequence of SKM_18 and variants thereof are set out elsewhere herein.

[0811] In some embodiments the muscle-specific promoter comprises a sequence according to SEQ ID NO: 149, or a functional variant thereof. In some embodiments, functional variants may have a sequence that is at least 60%, 65%, 70%, 75%, 80%, 85%, 90%, 95%, 96%, 97%, 98%, or 99% identical thereto. The promoter having a sequence according to SEQ ID NO: 149 is referred to as SP0316. The SP0316 promoter is particularly preferred in some embodiments. This promoter has been found to be very specific for muscle, which is advantageous in some circumstances.

### SP0320 and Variants Thereof

[0812] In some embodiments, the promoter is a synthetic muscle-specific promoter comprising a combination of muscle specific proximal promoter CRE0010 and cis-regulatory element CRE0035, or functional variants thereof. Typically, muscle specific proximal promoter CRE0010 and cis-regulatory element CRE0035 are operably linked to a further promoter element. In some preferred embodiments, the synthetic muscle-specific promoter comprises said proximal promoter and CRE, or functional variants thereof, in the order CRE0010, CRE0035 and then the further promoter element (order is given in an upstream to downstream direction, as is conventional in the art). In some embodiments, the synthetic muscle-specific promoter comprises said proximal promoter and CRE, or functional variants thereof, in the order CRE0035, CRE0010 and then the further promoter element. In some preferred embodiments, the synthetic muscle-specific promoter comprises said proximal promoter and CRE, or functional variants thereof, in the order CRE0010, CRE0035, the further promoter element followed by the CMV-IE 5′UTR and Intron,

[0813] The further promoter element can be any suitable proximal promoter or minimal promoter. In some embodiments, the promoter element is a minimal promoter. Where the promoter is a proximal promoter, it is generally preferred that the proximal promoter is muscle-specific.

[0814] In some preferred embodiments, the promoter element is SKM_18 or a functional variant thereof. SKM_18 is a muscle-specific proximal promoter.

[0815] Thus, in one embodiment the promoter comprises the following regulatory elements: CRE0010, CRE0035, SKM_18 and CMV-IE 5′UTR and intron, or functional variants thereof.

[0816] The sequence of CRE0010 and variants thereof are set out above.

[0817] The sequence of CRE0035 and variants thereof are set out above.

[0818] The sequence of SKM_18 and variants thereof are set out elsewhere herein.

[0819] The sequence of the CMV-IE 5′UTR and intron and variants thereof are set out elsewhere herein.

[0820] In some embodiments the muscle-specific promoter comprises a sequence according to SEQ ID NO: 150, or a functional variant thereof. In some embodiments, functional variants may have a sequence that is at least 60%, 65%, 70%, 75%, 80%, 85%, 90%, 95%, 96%, 97%, 98%, or 99% identical thereto. The promoter having a sequence according to SEQ ID NO: 150 is referred to as SP0320. The SP0320 promoter is particularly preferred in some embodiments. This promoter has been found to be very specific for muscle, which is advantageous in some circumstances.

### SP0326 and Variants Thereof

[0821] In some embodiments, the promoter is a synthetic muscle-specific promoter comprising CRE0071 operably linked to a promoter element. In some preferred embodiments, the synthetic muscle-specific promoter comprises CRE0071 immediately upstream of the promoter element.

[0822] The promoter element can be any suitable proximal or minimal promoter. In some embodiments, the promoter element is a minimal promoter. Where the promoter is a proximal promoter, it is generally preferred that the proximal promoter is muscle- specific.

[0823] In some preferred embodiments the promoter element is SKM_18 or functional variant thereof. SKM_18 is a muscle-specific proximal promoter.

[0824] In some embodiments the cardiac muscle-specific promoter comprises the following elements (or functional variants thereof): CRE0071 and then SKM_18.

[0825] The sequence of CRE0071 and variants thereof are set out above.

[0826] The sequence of SKM_18 and variants thereof are set out elsewhere herein.

[0827] In some embodiments the muscle-specific promoter comprises a sequence according to SEQ ID NO: 155, or a functional variant thereof. In some embodiments, functional variants may have a sequence that is at least 60%, 65%, 70%, 75%, 80%, 85%, 90%, 95%, 96%, 97%, 98%, or 99% identical thereto. The promoter having a sequence according to SEQ ID NO: 155 is referred to as SP0326. The SP0326 promoter is particularly preferred in some embodiments. This promoter has been found to be very specific for muscle, which is advantageous in some circumstances.

[0828] Table 6: The Sequence identifier numbers for the nucleic acid sequences of exemplary CREs (Cis-Regulatory Elements) for muscle-specific promoters that are active in both cardiac and skeletal muscle. which are disclosed in Table 5A.

TABLE 6

| | |
|---|---|
| NAME (SEQ ID NO:) | NAME (SEQ ID NO:) |
| CRE0016 (SEQ ID NO: 201) | DES_MT_ENHANCER_72 BP_V2 (SEQ ID NO: 231) |
| CRE0018 (SEQ ID NO: 202) | DES_MT_ENHANCER_72 BP_V3 (SEQ ID NO: 232) |
| CRE0020 (SEQ ID NO: 203) | DES_MT_ENHANCER_72 BP_V4 (SEQ ID NO: 233) |
| CRE0025 (SEQ ID NO: 204) | DES_MT_ENHANCER_72 BP_V5 (SEQ ID NO: 234) |
| CRE0027 (SEQ ID NO: 205) | DES_MT_ENHANCER_72 BP_V6 (SEQ ID NO: 235) |
| CRE0028 (SEQ ID NO: 40) | CRE0071.3 (SEQ ID NO: 43) |
| CRE0029 (SEQ ID NO: 206) | CRE0071.4 (SEQ ID NO: 236) |
| CRE0031 (SEQ ID NO: 207) | CRE0071.6 (SEQ ID NO: 237) |
| CRE0033 (SEQ ID NO: 41) | CRE0071.8 (SEQ ID NO: 238) |
| CRE0035 (SEQ ID NO: 208) | CRE0071.9 (SEQ ID NO: 239) |
| CRE0036 (SEQ ID NO: 209) | CRE0077 (SEQ ID NO: 240) |
| CRE0047 (SEQ ID NO: 210) | CRE0029.2 (SEQ ID NO: 241) |
| CRE0050 (SEQ ID NO: 211) | CRE0069.2 (SEQ ID NO: 242) |
| CRE0051 (SEQ ID NO: 212) | CRE0071.13 (SEQ ID NO: 243) |
| CRE0059 (SEQ ID NO: 213) | CRE0071.14 (SEQ ID NO: 244) |
| CRE0060 (SEQ ID NO: 214) | CRE0071.15 (SEQ ID NO: 245) |
| CRE0069 (SEQ ID NO: 215) | 72 BP (SEQ ID NO: 246) |
| CRE0071 (SEQ ID NO: 216) | CRE0093 (SEQ ID NO: 247) |
| CRE0071.5 (SEQ ID NO: 217) | CRE0094 (SEQ ID NO: 248) |
| CRE0073 (SEQ ID NO: 218) | CRE0071.16 (SEQ ID NO: 249) |
| CRE0074 (SEQ ID NO: 219) | CRE0071.17 (SEQ ID NO: 250) |
| CRE0075 (SEQ ID NO: 220) | CRE0071.18 (SEQ ID NO: 251) |
| CRE0076 (SEQ ID NO: 221) | CRE0071.19 (SEQ ID NO: 252) |
| CRE0078 (SEQ ID NO: 222) | CRE0071.20 (SEQ ID NO: 253) |
| CRE0079 (SEQ ID NO: 223) | CRE0071.21 (SEQ ID NO: 254) |
| 48 BP (SEQ ID NO: 224) | CRE0071.22 (SEQ ID NO: 255) |
| CRE0071.7 (SEQ ID NO: 225) | CRE0071.23 (SEQ ID NO: 256) |
| CRE0071.10 (SEQ ID NO: 226) | CNTRL_001 (67 BP) (SEQ ID NO: 257) |
| CRE0071.11 (SEQ ID NO: 227) | CRE0071.24 (SEQ ID NO: 258) |
| CRE0071.12 (SEQ ID NO: 228) | CNTRL_001 (SEQ ID NO: 259) |
| DES_MT_ENHANCER_48BP_V2 (SEQ ID NO: 229) | CRE0093.2 (SEQ ID NO: 260) |
| DES_MT_ENHANCER_48BP_V3 (SEQ ID NO: 230) | CRE0094.2 (SEQ ID NO: 261) |

[0829] Table 7: Exemplary minimal or proximal promoters used in some embodiments of the synthetic muscle-specific promoters that are active in cardiac and skeletal muscle of Table 5A.

TABLE 7

| | |
|---|---|
| Name | Name |
| CRE0005 (SEQ ID NO: 262) | CRE0056 (SEQ ID NO: 274) |
| CRE0009 (SEQ ID NO: 263) | CRE0070 (SEQ ID NO: 42) |
| CRE0010_ITGB1BP2 (SEQ ID NO: 264) | CRE0070.2 (SEQ ID NO: 275) |
| CRE0010_ALDOA (SEQ ID NO: 265) | CRE0072 (SEQ ID NO: 276) |
| CRE0034 (SEQ ID NO: 266) | SKM_14 (SEQ ID NO: 277) |
| CRE0037 (SEQ ID NO: 267) | SKM_18.2 (SEQ ID NO: 278) |
| CRE0046 (SEQ ID NO: 268) | SKM_18 (SEQ ID NO: 55) |
| CRE0048 (SEQ ID NO: 269) | SKM_20 (SEQ ID NO: 56) |
| CRE0049 (SEQ ID NO: 270) | RSV promoter (SEQ ID NO: 279) |
| CRE0053.2 SRL_mp (SEQ ID NO: 271) | DES_mp_v1 (SEQ ID NO: 280) |
| CRE0054 (SEQ ID NO: 272) | CRE0099 (SEQ ID NO: 281) |
| CRE0055 (SEQ ID NO: 273) | HTMB ev_4 (SEQ ID NO: 282) |

[0830] Table 14: Sequence identifier numbers of nucleic acid sequences of exemplary cis-regulatory modules (CRM) for shortened muscle-specific promoters that are active in both cardiac and skeletal muscle. which are disclosed in Table 13A.

TABLE 14

| CRM | SEQ ID NO: | length |
|---|---|---|
| CRM SP0502, SP0515, SP0521, and SP4169 | SEQ ID NO: 347 | 176 |
| CRM SP0522, SP0523, and SP0524 | SEQ ID NO: 351 | 162 |

[0831] Table 15: Sequence identifier numbers of nucleic acid sequences of exemplary CREs (Cis-Regulatory Elements) for shortened muscle-specific promoters that are active in both cardiac and skeletal muscle. which are disclosed in Table 13A.

TABLE 15

| CRM | SEQ ID NO: | length |
|---|---|---|
| CRE0145 | SEQ ID NO: 343 | 114 |

[0832] Table 16: Sequence identifier numbers of nucleic acid sequences of exemplary Promoter elements from synthetic promoters for shortened muscle-specific promoters that are active in both cardiac and skeletal muscle. which are disclosed in Table 13A.

TABLE 16

| CRM | SEQ ID NO: | length |
|---|---|---|
| BG mp | SEQ ID NO: 345 | 53 |
| SCP1 | SEQ ID NO: 346 | 81 |
| CRE0053 | SEQ ID NO: 344 | 69 |

### VIII. Synthetic Cardiac-Specific Expression Cassettes

[0833] The present invention also provides a synthetic cardiac-specific expression cassette comprising a synthetic cardiac-specific promoter of the present invention operably linked to a sequence encoding an expression product, suitably a gene (e.g. a transgene), e.g., an inhibitor of PP1 as disclosed herein, and/or an angiogenesis protein or peptide as disclosed herein.

[0834] In some preferred embodiments of the present invention, the gene encodes a therapeutic expression product, preferably a therapeutic polypeptide suitable for use in treating a disease or condition associated with aberrant gene expression, optionally in the heart tissue.

[0835] In some embodiments, therapeutic expression products include those useful in the treatment of a cardiovascular condition or heart disease and disorders, as disclosed herein. In some embodiments, the heart disorder is heart failure or CHF.

### C. Secretory Signal Peptides and Intron Sequences

[0836] In some embodiments, the nucleic acid encoding an inhibitor of PP1 can comprise a secretory peptide 5′ of the nucleic acid encoding the inhibitor of the PP1 (e.g., I-1, I-1c or a variant thereof). Suitable signal peptides are disclosed in WO2020/102645, which is incorporated herein in its entirety by reference. For example, a polynucleotide containing a suitable secretory sequence can be fused 5′ to the first codon of the selected inhibitor of PP1, or angiogenic protein gene. In some embodiments, a suitable secretory signal sequences include signal sequences of the FGF-4, FGF-5, FGF-6 genes or a signal sequence of a different secreted protein such as IL-1-beta. In some embodiments, a suitable secretory sequence is a secretory signal sequence derived from a protein that is normally secreted from cardiac myocytes. In some embodiments, the nucleic acid encoding the inhibitor of PP1 or angiogenic protein or peptide comprises a targeting peptide, e.g., a suitable cardiac targeting peptide is disclosed in WO2018/170310 or US20170166926A1, which is incorporated herein in its entirety by reference. Other suitable targeting peptides include the peptides targeting coronary artery endothelial cells identified by Muller et al., Nature Biotechnology 21:1040-1046 (2003), and disclosed as SEQ ID NO: 2-126 as disclosed in WO2019/216932A1, which is incorporated herein in its entirety by reference.

[0837] In some embodiments, the rAAV genotype comprises an intron sequence located 3′ of the promoter sequence and 5′ of a secretory signal peptide, if present or 5′ of the nucleic acid sequence encoding the PP1 inhibitor. Intron sequences serve to increase one or more of: mRNA stability, mRNA transport out of nucleus and/or expression and/or regulation of the expressed polypeptide.

[0838] In some embodiments, the intron sequence is a MVM intron sequence, for example, but not limited to and intron sequence of SEQ ID NO: 13 as disclosed in WO2020/102645, or nucleic acid sequence having at least 80%, 85%, 90%, 95%, 96%, 97%, 98% or 99% nucleotide sequence identity thereto.

[0839] In some embodiments, the intron sequence is a HBB2 intron sequence, for example, but not limited to and intron sequence of SEQ ID NO: 14 as disclosed in WO2020/102645, or nucleic acid sequence having at least 80%, 85%, 90%, 95%, 96%, 97%, 98% or 99% nucleotide sequence identity thereto.

[0840] In some embodiments of the methods and compositions disclosed herein, a recombinant AAV vector comprises a heterologous nucleic acid sequence that further comprises an intron sequence located 5′ of the sequence encoding the secretory signal peptide, and 3′ of the promoter. In some embodiments, the intron sequence comprises a MVM sequence or a HBB2 sequence, wherein the MVN sequence comprises the nucleic acid sequence of SEQ ID NO: 13 as disclosed in WO2020/102645, or a nucleic acid sequence at least about 75%, or 80%, or 85%, or 90%, or 95%, or 98%, or 99% sequence identity to SEQ ID NO: 13 as disclosed in WO2020/102645, and the HBB2 sequence comprises the nucleic acid sequence of SEQ ID NO: 14 as disclosed in WO2020/102645, or a nucleic acid sequence at least about 75%, or 80%, or 85%, or 90%, or 95%, or 98%, or 99% sequence identity to SEQ ID NO: 14 as disclosed in WO2020/102645.

[0841] In some embodiments, the rAAV genotype comprises an intron sequence selected in the group consisting of a human beta globin b2 (or HBB2) intron, a FIX intron, a chicken beta-globin intron, and a SV40 intron. In some embodiments, the intron is optionally a modified intron such as a modified HBB2 intron (see, e.g., SEQ ID NO: 17 in of WO2018046774A1): a modified FIX intron (see., e.g., SEQ ID NO: 19 in WO2018046774A1), or a modified chicken beta-globin intron (e.g., see SEQ ID NO: 21 in WO2018046774A1), or modified HBB2 or FIX introns disclosed in WO2015/162302, which are incorporated herein in their entirety by reference.

### D. Poly A

[0842] In some embodiments, an rAAV vector genome includes at least one poly-A tail that is located 3′ and downstream from the heterologous nucleic acid gene encoding the PP1 inhibitor (e.g., I-1 or I-1c). In some embodiments, the polyA signal is 3′ of a stability sequence or CS sequence as defined herein. Any polyA sequence can be used, including but not limited to hGH poly A, synpA polyA and the like. In some embodiments, the polyA is a synthetic polyA sequence. In some embodiments, the rAAV vector genome comprises two poly-A tails, e.g., a hGH poly A sequence and another polyA sequence, where a spacer nucleic acid sequence is located between the two poly A sequences. In some embodiments, the rAAV genome comprises 3′ of the nucleic acid encoding the PP1 inhibitor (e.g., I-1 or I-1c), the following elements; a first polyA sequence, a spacer nucleic acid sequence (of between 100-400 bp, or about 250 bp), a second poly A sequence, a spacer nucleic acid sequence, and the 3′ ITR. In some embodiments, the first and second poly A sequence is a hGH poly A sequence, and in some embodiments, the first and second poly A sequences are a synthetic poly A sequence. In some embodiments, the first poly A sequence is a hGH poly A sequence and the second poly A sequence is a synthetic sequence, or vice versa - that is, in alternative embodiments, the first poly A sequence is a synthetic poly A sequence and the second poly A sequence is a hGH polyA sequence. An exemplary poly A sequence is, for example, hGH poly A sequence (SEQ ID NO: 66), or a poly A nucleic acid sequence having at least 80%, 85%, 90%, 95%, 96%, 97%, 98% or 99% nucleotide sequence identity to SEQ ID NO: 66. In some embodiments, the hGHpoly sequence encompassed for use is described in Anderson et al. J. Biol. Chem 264(14); 8222-8229, 1989 (See, e.g. p. 8223, 2nd column, first paragraph) which is incorporated herein in its entirety by reference.

[0843] In some embodiments, a poly-A tail can be engineered to stabilize the RNA transcript that is transcribed from an rAAV vector genome, including a transcript for a heterologous gene, which in one embodiment the PP1 inhibitor (e.g., I-1 or I-1c), and in alternative embodiments, the poly-A tail can be engineered to include elements that are destabilizing.

[0844] In some embodiments of the methods and compositions disclosed herein, a recombinant AAV vector comprises at least one polyA sequence located 3′ of the nucleic acid encoding the PP1 inhibitor (e.g., I-1 or I-1c) peptide and 5′ of the 3′ ITR sequence.

[0845] In an embodiment, a poly-A tail can be engineered to become a destabilizing element by altering the length of the poly-A tail. In an embodiment, the poly-A tail can be lengthened or shortened. In some embodiments, the 3′ untranslated region comprises a 3′ UTR.

[0846] In some embodiments, a destabilizing element is a microRNA (miRNA) that has the ability to silence (repress translation and promote degradation) the RNA transcripts the miRNA bind to that encode a heterologous gene. In an embodiment, addition or deletion of seed regions within the poly-A tail can increase or decrease expression of a protein, such as the PP1 inhibitor (e.g., I-1 or I-1c) as disclosed herein.

[0847] In some embodiments, seed regions can also be engineered into the 3′ untranslated regions located between the heterologous gene and the poly-A tail. In a further embodiment, the destabilizing agent can be an siRNA. The coding region of the siRNA can be included in an rAAV vector genome and is generally located downstream, 3′ of the poly-A tail.

[0848] In all aspects of the methods and compositions as disclosed herein, the rAAV genome may also comprise a Stuffer DNA nucleic sequence. An exemplary stuffer DNA sequence is any non-coding DNA sequence. An exemplary stuffer DNA sequences are shown Table 9, or a nucleic acid sequence having at least 80%, 85%, 90%, 95%, 96%, 97%, 98% or 99% nucleotide sequence identity to a sequence shown in Table 9. In some embodiments, the stuffer sequence is located 3 of the poly A tail, for example, and is located 5′ of the ‘3 ITR sequence. In some embodiments, the stuffer DNA sequence comprises a synthetic polyadenylation signal in the reverse orientation.

[0849] In some embodiments, a stuffer nucleic acid sequence can be located between the poly A sequence and the 3′ ITR (i.e., a stuffer nucleic acid sequence is located 3′ of the polyA sequence and 5′ of the 3′ ITR). Such a stuffer nucleic acid sequence can be about 30 bp, 50 pb, 75 bp, 100 bp, 150 bp, 200 bp, 250 bp, 300 bp or longer than 300 bp. In some embodiments of the methods and compositions as disclosed herein, a stuffer nucleic acid fragment is between 20-50 bp, 50-100 bp, 100-200 bp, 200-300 bp, 300-500 bp, or any integer between 20-500 bp. Exemplary stuffer (or spacer) nucleic acid sequence comprise Exemplary stuffer (or spacer) nucleic acid sequence comprise the Sequences shown in Table 9, or a nucleic acid sequence at least about 70, 71, 72, 73, 74, 75, 76, 77, 78, 79, 80, 81, 82, 83, 84, 85, 86, 87, 88, 89, 90, 91, 92, 93, 94, 95, 96, 97, 98, 99%, identical to the sequences shown in Table 9.

[0850] Table 9 Exemplary spacer or stuffer sequences:

| | |
|---|---|
| Exemplary Stuffer sequences | SEQ ID NO: |
| Stuffer sequence 1 | SEQ ID NO: 67 |
| Stuffer sequence 2 | SEQ ID NO: 68 |
| Stuffer sequence 3 | SEQ ID NO: 69 |

[0851] Suitably the rAAV vector as disclosed herein comprising a synthetic cardiac-specific promoter can further comprises sequences providing or coding for one or more of, and preferably all of, a ribosomal binding site, a start codon, a stop codon, and a transcription termination sequence. Suitably the rAAV vector comprises an expression cassette comprises a nucleic acid encoding a posttranscriptional regulatory element. Suitably the expression cassette comprises a nucleic acid encoding a polyA element.

### Poly A, Double Stranded RNA Termination Element and Reverse Poly A

[0852] As described herein, the rAAV comprising nucleic acid sequence encoding phosphatase inhibitor gene e.g, I I c gene as disclosed herein, the nucleic acid sequence further comprises a polyadenylation signal or, polyA signal after the coding sequence of I1c gene or, codon optimized I1c gene as disclosed herein. In some embodiments, the poly A signal is homologous. In some embodiments, the poly A signal is heterologous. In some embodiments, the poly A signal may comprise a double stranded RNA termination element and/or, a reverse poly A. In some embodiments, the poly A signal is double stranded RNA termination element and/or, a reverse poly A. In some embodiments, the reverse poly A or, double stranded RNA terminator is located after the homologous or, heterologous poly A signal sequence.

[0853] A ‘double stranded RNA termination element’ is an element that inhibits transcription of double stranded RNA, e.g. from the 3′ ITR. In some embodiments, the double stranded RNA termination element is located downstream of the I1c gene and upstream of 3′ITR, in 3′ to 5′ orientation. In 3′ to 5′ orientation, the termination element does not allow the transcription from 3′ITR and hence double stranded RNA is not transcribed from 3′ITR. Any termination element can be used including e.g. inverted natural polyA sequences from any species or synthetic polyA signals, or, fragments thereof; or other nucleic acid structure terminators known in the art. Exemplary polyA signal and/or, transcription terminators include, but are not limited to polyA signals of BGH, SV40, HGH, Betaglobin, RNA polymerase II transcriptional pause signal from alpha 2 globin gene, transcription termination signal for pol III, fragments thereof and any combination thereof.

[0854] A ‘reverse poly A′ is a polyA signal sequence placed in a 3′-5’ orientation downstream of the I1c transgene and upstream of 3′ITR. Any natural or synthetic poly A in 3′-5′ orientation can be used as reverse poly A. In some embodiments, the reverse poly A is the poly A (pA) as described in International publication no. WO2019143950 and U.S. Application Publication No. US20200340013, which are incorporated herein by reference in entirety. In several embodiments, the ‘reverse poly A’ and ‘the double stranded RNA termination element’ are used interchangeably. In 3′ to 5′ orientation, the reverse poly A or, the termination element does not allow the transcription from 3′ITR and hence double stranded RNA is not transcribed from 3′ITR. The reverse poly A or, the double stranded RNA termination element can be heterologous e.g, from a different gene than the gene of interest, or, homologous, e.g., the same gene as the gene of interest. In the instant application, the gene of interest is I1c.

[0855] In various embodiments, the poly A signal comprise the double stranded RNA transcription element or reverse poly A. In some embodiments, the 5′ end of double stranded RNA termination element or, reverse poly A sequence and the 3′ end of poly A signal is right next to each other or, 1 neucleotide apart, or, 2 neucleotides apart, or, 3 neucleotides apart, or, 4 neucleotides apart, or,5 neucleotides apart, or, 6 neucleotides apart, or, 7 neucleotides apart, or, 8 neucleotides apart, or, 9 neucleotides apart, or, 10 neucleotides apart, or more than 10 neucleotides apart. In some embodiments, the poly A signal does not comprise double stranded RNA transcription element or reverse poly A. n some embodiments the poly A signal comprises AATAAA or, AAUAAA. In some embodiments, the poly A signal comprises 1, or, 2, or, 3, or, 4, or 5, or, 6 or, 7, or, 8, or, 9 or, 10 or, more repeats of AATAAA or, AAUAAA. In some embodiments, the poly A signal comprises transcription termination signal for Pol III as described in “Delineation of the Exact Transcription Termination Signal for Type 3 Polymerase III. Mol Ther Nucleic Acids. 2018 Mar 2;10:36-44, which is incorporated herein by reference in its entirety. In some embodiments, one or, more of transcription termination signal for Pol III is in 3′ to 5′ orientation. In some embodiments, the poly A signal comprises TTTT. In some embodiments, poly A signal comprises AAAAAAA.

[0856] Exemplary Double stranded RNA Termination element sequence is (RNA polymerase II transcription pause signal) is SEQ ID NO: 332 or a sequence with at least 80% sequence identity to SEQ ID NO: 332.

[0857] Exemplary poly A sequences for use in the rAAV and linear DNA as disclosed herein include, but are not limited to (i) a hGH poly(A) signal and terminator sequence with a nucleic acid sequence of SEQ ID NO: 331 or a nucleic acid sequence having at least 80% sequence identity to SEQ ID NO: 331; (ii) a SV40 poly A sequence having a nucleic acid comprising SEQ ID NO: 334 or a nucleic acid sequence having at least 80% sequence identity to SEQ ID NO: 331; (iii) a full synthetic poly A sequence comprising a nucleic acid of SEQ ID NO: 335 or a nucleic acid sequence having at least 80% sequence identity to SEQ ID NO: 335; (iv) a minimal synthetic poly A sequence comprising a nucleic acid of SEQ ID NO: 284 or a nucleic acid sequence having at least 80% sequence identity to SEQ ID NO: 284, (v) a minimal synthetic poly A sequence comprising a nucleic acid of SEQ ID NO: 285 or a nucleic acid sequence having at least 80% sequence identity to SEQ ID NO: 285; (vi) a shortest naturally occurring SV40 early poly A signal (SV40 early poly A) comprising a nucleic acid of SEQ ID NO: 286 or a nucleic acid sequence having at least 80% sequence identity to SEQ ID NO: 286; (vii) a RBG poly A comprising a nucleic acid of SEQ ID NO: 287 or a nucleic acid sequence having at least 80% sequence identity to SEQ ID NO: 287. The poly A sequences as described in “Definition of an efficient synthetic poly(A) site” Genes Dev. 1989 Jul;3(7):1019-25. doi: 10.1101/gad.3.7.1019., which is incorporated by reference in its entirety. All the above described poly A sequences and or, terminator sequences can be used as inverted sequence e.g., in 3′ to 5′ orientation.

### E. AA V ITRS

[0858] The rAAV genome as disclosed here comprises AAV ITRs that have desirable characteristics and can be designed to modulate the activities of, and cellular responses to vectors that incorporate the ITRs. In some embodiments, the AAV ITRs are synthetic AAV ITRs that has desirable characteristics and can be designed to manipulate the activities of and cellular responses to vectors comprising one or two synthetic ITRs, including, as set forth in U.S. Pat. No. 9,447433, which is incorporated herein by reference.

[0859] In some embodiments, an ITR exhibits modified transcription activity relative to a naturally occurring ITR, e.g., ITR2 from AAV2. It is known that the ITR2 sequence inherently has promoter activity. It also inherently has termination activity, similar to a poly(A) sequence. The minimal functional ITR of the present invention exhibits transcription activity as shown in the examples, although at a diminished level relative to ITR2. Thus, in some embodiments, the ITR is functional for transcription. In other embodiments, the ITR is defective for transcription. In certain embodiments, the ITR can act as a transcription insulator, e.g., preventing transcription of a transgenic cassette present in the vector when the vector is integrated into a host chromosome.

[0860] One aspect of the invention relates to an rAAV vector genome comprising at least one synthetic AAV ITR, wherein the nucleotide sequence of one or more transcription factor binding sites in the ITR is deleted and/or substituted, relative to the sequence of a naturally occurring AAV ITR such as ITR2. In some embodiments, it is the minimal functional ITR in which one or more transcription factor binding sites are deleted and/or substituted. In some embodiments at least 1 transcription factor binding site is deleted and/or substituted, e.g., at least 5 or more or 10 or more transcription factor binding sites, e.g., at least 1, 2, 3, 4, 5, 6, 7, 8, 9, 10, 11, 12, 13, 14, 15, 16, 17, 18, 19, 20, or 21 transcription factor binding sites.

[0861] Another embodiment, a rAAV vector, including an rAAV vector genome as described herein comprises a polynucleotide comprising at least one synthetic AAV ITR, wherein one or more CpG islands (a cytosine base followed immediately by a guanine base (a CpG) in which the cytosines in such arrangement tend to be methylated) that typically occur at, or near the transcription start site in an ITR are deleted and/or substituted. In an embodiment, deletion or reduction in the number of CpG islands can reduce the immunogenicity of the rAAV vector. This results from a reduction or complete inhibition in TLR-9 binding to the rAAV vector DNA sequence, which occurs at CpG islands. It is also well known that methylation of CpG motifs results in transcriptional silencing. Removal of CpG motifs in the ITR is expected to result in decreased TLR-9 recognition and/or decreased methylation and therefore decreased transgene silencing. In some embodiments, it is the minimal functional ITR in which one or more CpG islands are deleted and/or substituted. In an embodiment, AAV ITR2 is known to contain 16 CpG islands of which one or more, or all 16 can be deleted.

[0862] In some embodiments, at least 1 CpG motif is deleted and/or substituted, e.g., at least 4 or more or 8 or more CpG motifs, e.g., at least 1, 2, 3, 4, 5, 6, 7, 8, 9, 10, 11, 12, 13, 14, 15, or 16 CpG motifs.

[0863] In some embodiments, the synthetic ITR comprises, consists essentially of, or consists of one of the nucleotide sequences listed below. In other embodiments, the synthetic ITR comprises, consist essentially of, or consist of a nucleotide sequence that is at least 80% identical, e.g., at least 85%, 90%, 95%, 96%, 97%, 98%, or 99% identical to one of the nucleotide sequences listed in Table 10.

[0864] Table 10: Exemplary synthetic ITR sequences:

TABLE 10

| | |
|---|---|
| ITR Name | SEQ ID NO: |
| MH-257 | SEQ ID NO: 70 |
| MH-258 | SEQ ID NO: 71 |
| MH Delta 258 | SEQ ID NO: 72 |
| MH Telomere-1 ITR | SEQ ID NO: 73 |
| MH Telomere-2 ITR | SEQ ID NO: 74 |
| MH PolII 258 ITR | SEQ ID NO: 75 |
| MH 258 Delta D conservative | SEQ ID NO: 76 |
| 5′ AAV2-ITR | SEQ ID NO: 77 |
| 3′ AAV2 ITR | SEQ ID NO: 78 |

### IV. Vectors and Virions

[0865] The present invention further provides a vector comprising a synthetic cardiac-specific promoter, or expression cassette according to the present invention.

[0866] In some embodiments, the vector is a gene therapy vector. Various gene therapy vectors are known in the art, and mention can be made of AAV vectors, adenoviral vectors, retroviral vectors and lentiviral vectors. Where the vector is a gene therapy vector the vector preferably comprises a nucleic acid sequence operably linked to the synthetic cardiac-specific promoter of the invention that encodes a therapeutic product, suitably a therapeutic protein, e.g., an inhibitor of PP1, as disclosed herein. In some embodiments, the inhibitor of PP1, e.g., I-1 or I-1c, or a variant thereof is a secretable protein, or fused to a signal peptide for secretion.

[0867] In some embodiments the vector is an AAV vector. In some embodiments the AAV has a serotype suitable or specifically optimised for cardiac transduction. In some embodiments, the AAV is selected from the group consisting of: AAV1, AAV2, AAV4, AAV5, AAV8, AAV9, AAVrh 10, AAV2i8, AAVDJ8 and AAV2g9, or derivatives thereof.

[0868] AAV vectors are preferably used as self-complementary, double-stranded AAV vectors (scAAV) in order to overcome one of the limiting steps in AAV transduction (i.e. single-stranded to double-stranded AAV conversion), although the use of single-stranded AAV vectors (ssAAV) is also encompassed herein. In some embodiments of the invention, the AAV vector is chimeric, meaning it comprises components from at least two AAV serotypes, such as the ITRs of an AAV2 and the capsid protein of an AAV5. AAV9 is known to effectively transduce cardiac cells, e.g., cardiomyocytes and cardiac tissue particularly effectively, and thus AAV9 and derivatives thereof are of particular interest for targeting cardiac cells and tissue. AAV2g9 is known to effectively transduce cardiac cells and tissue particularly effectively, and thus AAV2g9 and derivatives thereof are of particular interest for targeting cardiac cells and cardiac tissue. AAVrh10 is known to effectively transduce cardiac cells and tissue particularly effectively, and thus AAVrh 10 and derivatives thereof are of particular interest for targeting cells and cardiac tissue.

[0869] In one embodiment, the rAAV vector (also referred to as a rAAV virion) as disclosed herein comprises a capsid protein, and a rAAV genome in the capsid protein.

[0870] In one embodiment, the AAV vector as disclosed herein comprises a capsid protein from any of those disclosed in WO2019/241324, which is specifically incorporated herein in its entirety by reference. In some embodiments, the rAAV vector comprises a cardiac specific capsid, e.g., a cardiac specific capsid selected from XL32 and XL32.1, as disclosed in WO2019/241324, which is incorporated herein in its entirety by reference. In some embodiments, the rAAV vector is a AAVXL32 or AAVXL32.1 as disclosed in WO2019/241324, which is incorporated herein in its entirety by reference.

[0871] Exemplary chimeric or variant capsid proteins that can be used as the AAV capsid in the rAAV vector described herein can be selected from Table 2 from U.S. Provisional Application 62,937,556, filed on Nov. 19, 2019, which is specifically incorporated herein in its reference, or can be used with any combination with wild type capsid proteins and/or other chimeric or variant capsid proteins now known or later identified and each is incorporated herein. In some embodiments, the rAAV vector encompassed for use is a chimeric vector, e.g., as disclosed in 9,012,224 and US 7,892,809, which are incorporated herein in their entirety by reference.

[0872] In some embodiments, the rAAV vector is a haploid rAAV vector, as disclosed in WO2018/170310A1 or polyploid rAAV vector, e.g., as disclosed in WO2019/216932A1 and in U.S. Application 16/151,110, each of which are incorporated herein in their entirety by reference. In some embodiments, the rAAV vector is a rAAV3 vector, as disclosed in 9,012,224 and WO 2017/106236 which are incorporated herein in their entirety by reference.

[0873] In a particular embodiment, the rAAV is a AAVXL32 or AAVXL32.1 AAV vector as disclosed in WO2019/241324, which is incorporated herein in its entirety by reference.

[0874] In one embodiment, the rAAV vector as disclosed herein comprises a capsid protein, associated with any of the following biological sequence files listed in the file wrappers of USPTO issued patents and published applications, which describe chimeric or variant capsid proteins that can be incorporated into the AAV capsid of this invention in any combination with wild type capsid proteins and/or other chimeric or variant capsid proteins now known or later identified (for demonstrative purposes, 11486254 corresponds to U.S. Pat. Application No. 11/486,254 and the other biological sequence files are to be read in a similar manner): 11486254, 11932017, 12172121, 12302206, 12308959, 12679144, 13036343, 13121532, 13172915, 13583920, 13668120, 13673351, 13679684, 14006954, 14149953, 14192101, 14194538, 14225821, 14468108, 14516544, 14603469, 14680836, 14695644, 14878703, 14956934, 15191357, 15284164, 15368570, 15371188, 15493744, 15503120, 15660906, and 15675677.

[0875] In one embodiment, the rAAV vector (also referred to as a rAAV virion) as disclosed herein comprises a capsid protein, and a rAAV genome in the capsid protein. A rAAV capsid of the rAAV virion used to treat cardiovascular diseases or heart diseases or heart failure is any of those listed in Table 11, or any combination thereof.

[0876] Table 11: AAV Serotypes and exemplary Published corresponding capsid sequence.

TABLE 11

| | |
|---|---|
| Serotype and where capsid sequence is published | Serotype and where capsid sequence is published |
| AAV3.3b (See SEQ ID NO:72 in US20030138772) | AAV3-3 (See SEQ ID NO: 200 US20150315612) |
| AAV3-3 (See SEQ ID NO:217 US20150315612) | AAV3a ((See SEQ ID NO: 5 in US6156303) |
| AAV3a (See SEQ ID NO: 9 in US6156303) | AAV3b (See SEQ ID NO: 6 in US6156303) |
| AAV3b (See SEQ ID NO: 10 in US6156303) | AAV3b (See SEQ ID NO: 1 in US6156303) |
| AAV4 (See SEQ ID NO: 17 US20140348794) | AAV4 ((See SEQ ID NO:5 in US20140348794) |
| AAV4 (See SEQ ID NO: 3 in US20140348794) | AAV4 (See SEQ ID NO: 14 in US20140348794) |
| AAV4 (See SEQ ID NO: 15 in US20140348794) | AAV4 (See SEQ ID NO: 19 in US20140348794) |
| AAV4 (See SEQ ID NO: 12 in US20140348794) | AAV4 (See SEQ ID NO: 13 in US20140348794) |
| AAV4 (See SEQ ID NO: 7 in US20140348794) | AAV4 (See SEQ ID NO: 8 in US20140348794) |
| AAV4 (See SEQ ID NO: 9 in US20140348794) | AAV4 (See SEQ ID NO: 2 in US20140348794) |
| AAV4 (See SEQ ID NO: 10 in US20140348794) | AAV4 (See SEQ ID NO: 11 in US20140348794) |
| AAV4 (See SEQ ID NO: 18 in US20140348794) | AAV4 (See SEQ ID NO:63 in US20030138772) and US20160017295 SEQ |
| ID NO: (See SEQ ID NO: 4 in US20140348794) | AAV4 (See SEQ ID NO: 16 in US20140348794) |
| AAV4 (See SEQ ID NO: 20 in US20140348794) | AAV4 (See SEQ ID NO: 6 in US20140348794) |
| AAV4 (See SEQ ID NO: 1 in US20140348794) | AAV42.2 (See SEQ ID NO: 9 in US20030138772) |
| AAV42.2 (See SEQ ID NO: 102 in US20030138772) | AAV42.3b (See SEQ ID NO: 36 in US20030138772) |
| AAV42.3B (See SEQ ID NO: 107 in US20030138772) | AAV42.4 (See SEQ ID NO: 33 in US20030138772) |
| AAV42.4 (See SEQ ID NO: 88 in US20030138772) | AAV42.8 (See SEQ ID NO: 27 in US20030138772) |
| AAV42.8 (See SEQ ID NO: 85 in US20030138772) | AAV43.1 (See SEQ ID NO: 39 in US20030138772) |
| AAV43.1 (See SEQ ID NO: 92 in US20030138772) | AAV43.12 (See SEQ ID NO: 41 in US20030138772) |
| AAV43.12 (See SEQ ID NO: 93 in US20030138772) | AAV8 (See SEQ ID NO: 15 in US20150159173) |
| AAV8 (See SEQ ID NO: 7 in US20150376240) | AAV8 (See SEQ ID NO:4 in US20030138772;US20150315612 SEQ |
| ID NO: 182 | AAV8 (See SEQ ID NO: 95 in US20030138772), US20140359799 SEQ |
| AAV8 (See SEQ ID NO: 31 in US20150159173) | AAV8 (See, e.g., SEQ ID NO: 8 in US20160017295, or SEQ ID NO:7 in US7198951, or SEQ ID NO: 223 in US20150315612) |
| AAV8 (See SEQ ID NO: 8 in US20150376240) | AAV8 (See SEQ ID NO: 214 in US20150315612) |
| AAV-8b (See SEQ ID NO: 5 in US20150376240) | AAV-8b (See SEQ ID NO: 3 in US20150376240) |
| AAV-8h (See SEQ ID NO: 6 in US20150376240) | AAV-8h (See SEQ ID NO: 4 in US20150376240) |
| AAV9 (See SEQ ID NO: 5 in US20030138772) | AAV9 (See SEQ ID NO: 1 in US7198951) |
| AAV9 (See SEQ ID NO: 9 in US20160017295) | AAV9 (See SEQ ID NO: 100 in US20030138772), US7198951 SEQ ID NO: 2 |
| | AAV9 (See SEQ ID NO: 3 in US7198951) |
| AAV9 (AAVhu.14) (See SEQ ID NO: 3 in US20150315612) | AAV9 (AAVhu.14) (See SEQ ID NO: 123 in US20150315612) |
| AAVA3.1 (See SEQ ID NO: 120 in US20030138772) | AAVA3.3 (See SEQ ID NO: 57 in US20030138772) |
| AAVA3.3 (See SEQ ID NO: 66 in US20030138772) | AAVA3.4 (See SEQ ID NO: 54 in US20030138772) |
| AAVA3.4 (See SEQ ID NO: 68 in US20030138772) | AAVA3.5 (See SEQ ID NO: 55 in US20030138772) |
| AAVA3.5 (See SEQ ID NO: 69 in US20030138772) | AAVA3.7 (See SEQ ID NO: 56 in US20030138772) |
| AAVA3.7 (See SEQ ID NO: 67 in US20030138772) | AAV29. (See SEQ ID NO: 11 in (AAVbb. 1) 161 US20030138772) |
| AAVC2 (See SEQ ID NO: 61 in US20030138772) | AAVCh.5 (See SEQ ID NO:46 in US20150159173); US20150315612 SEQ |
| ID NO: 234 | AAVcy.2 (AAV 13.3) (See SEQ ID NO: 15 in US20030138772) |
| AAV24.1 (See SEQ ID NO: 101 in US20030138772) | AAVcy.3 (AAV24.1) (See SEQ ID NO: 16 in US20030138772) |
| AAV27.3 (See SEQ ID NO: 104 in US20030138772) | AAVcy.4 (AAV27.3) (See SEQ ID NO: 17 in US20030138772) |
| AAVcy.5 (See SEQ ID NO: 227 in US20150315612) | AAV7.2 (See SEQ ID NO: 103 in US20030138772) |
| AAVcy.5 (AAV7.2) (See SEQ ID NO: 18 in US20030138772) | AAV 16.3 (See SEQ ID NO: 105 in US20030138772) |
| AAVcy.6 (AAV 16.3) (See SEQ ID NO: 10 in US20030138772) | AAVcy.5 (See SEQ ID NO: 8 in US20150159173) |
| AAVcy.5 (See SEQ ID NO: 24 in US20150159173) | AAVCy.5Rl (See SEQ ID NO: in US20150159173 |
| AAVCy.5R2 (See SEQ ID NO: in US20150159173) | AAVCy.5R3 (See SEQ ID NO: in US20150159173 |
| AAVCy.5R4 (See SEQ ID NO: in US20150159173) | AAVDJ (See SEQ ID NO: 3 in US20140359799) and SEQ ID NO: 2 in US7588772) |
| | AAVDJ (See SEQ ID NO: 2 in US20140359799; and SEQ ID NO: 1 in US7588772) |
| | AAVDJ-8 (See SEQ ID NO: in US7588772; Grimm et al 2008 |
| AAVDJ-8 (See SEQ ID NO: in US7588772; Grimm et al 2008 | AAVF5 (See SEQ ID NO: 110 in US20030138772) |
| AAVH2 (See SEQ ID NO: 26 in US20030138772) | AAVH6 (See SEQ ID NO: 25 in US20030138772) |
| AAVhE1.1 (See SEQ ID NO: 44 in US9233131) | AAVhEr1.14 (See SEQ ID NO: 46 in US9233131) |
| AAVhEr1.16(See SEQ ID NO: 48 in US9233131) | AAVhEr1.18 (See SEQ ID NO: 49 in US9233131) |
| AAVhEr1.23 (AAVhEr2.29) (See SEQ ID NO: 53 in US9233131) | AAVhEr1.35 (See SEQ ID NO: 50 in US9233131) |
| AAVhEr1.36 (See SEQ ID NO: 52 in US9233131) | AAVhEr1.5 (See SEQ ID NO: 45 in US9233131) |
| AAVhEr1.7 (See SEQ ID NO: 51 in US9233131) | AAVhEr1.8 (See SEQ ID NO: 47 in US9233131) |
| AAVhEr2.16 (See SEQ ID NO: 55 in US9233131) | AAVhEr2.30 (See SEQ ID NO: 56 in US9233131) |
| AAVhEr2.31 (See SEQ ID NO: 58 in US9233131) | AAVhEr2.36 (See SEQ ID NO: 57 in US9233131) |
| AAVhEr2.4 (See SEQ ID NO: 54 in US9233131) | AAVhEr3.1 (See SEQ ID NO: 59 in US9233131) |
| AAVhu.1 (See SEQ ID NO: 46 in US20150315612) | AAVhu.1 (See SEQ ID NO: 144 in US20150315612) |
| AAVhu.1O(AAV16.8) (See SEQ ID NO: 56 in US20150315612) | AAVhu.1O(AAV 16.8) (See SEQ ID NO: 156 in US20150315612) |
| AAVhu.11(AAV 16.12) (See SEQ ID NO: 57 in US20150315612) | AAVhu.11 (AAV 16.12) (See SEQ ID NO: 153 in US20150315612) |
| AAVhu.12 (See SEQ ID NO: 59 in US20150315612) | AAVhu.12 (See SEQ ID NO: 154 in US20150315612) |
| AAVhu.13 (See SEQ ID NO: 16 in US2015015917 and ID NO: 71 in US20150315612) | |
| AAVhu.13 (See SEQ ID NO: 32 in US20150159173 and ID NO: 129 US20150315612) | |
| AAVhu.136.1 (See SEQ ID NO: 165 in US20150315612) | AAVhu.140.1 (See SEQ ID NO: 166 in US20150315612) |
| AAVhu.140.2 (See SEQ ID NO: 167 in US20150315612) | AAVhu.145.6 (See SEQ ID NO: 178 in US20150315612) |
| AAVhu.15 (See SEQ ID NO: 147 in US20150315612) | AAVhu.15 (AAV33.4) (See SEQ ID NO: 50 in US20150315612) |
| AAVhu.156.1 (See SEQ ID NO: 179 in US20150315612) | AAVhu.16 (See SEQ ID NO: 148 in US20150315612) |
| AAVhu.16 (AAV33.8) (See SEQ ID NO: 51 in US20150315612) | AAVhu.17 (See SEQ ID NO: 83 in US20150315612) |
| AAVhu.17 (AAV33.12) (See SEQ ID NO: 4 in US20150315612) | AAVhu.172.1 (See SEQ ID NO: 171 in US20150315612) |
| AAVhu.172.2 (See SEQ ID NO: 172 in US20150315612) | AAVhu.173.4 (See SEQ ID NO: 173 in US20150315612) |
| AAVhu.173.8 (See SEQ ID NO: 175 in US20150315612) | AAVhu.18 (See SEQ ID NO: 52 in US20150315612) |
| AAVhu.18 (See SEQ ID NO: 149 in US20150315612) | AAVhu.19 (See SEQ ID NO: 62 in US20150315612) |
| AAVhu.19 (See SEQ ID NO: 133 in US20150315612) | AAVhu.2 (See SEQ ID NO: 48 in US20150315612) |
| AAVhu.2 (See SEQ ID NO: 143 in US20150315612) | AAVhu.20 (See SEQ ID NO: 63 in US20150315612) |
| AAVhu.20 (See SEQ ID NO: 134 in US20150315612) | AAVhu.21 (See SEQ ID NO: 65 in US20150315612) |
| AAVhu.21 (See SEQ ID NO: 135 in US20150315612) | AAVhu.22 (See SEQ ID NO: 67 in US20150315612) |
| AAVhu.22 239 (See SEQ ID NO: 138 in US20150315612) | AAVhu.23 (See SEQ ID NO: 60 in US20150315612) |
| AAVhu.23.2 (See SEQ ID NO: 137 in US20150315612) | AAVhu.24 (See SEQ ID NO: 66 in US20150315612) |
| AAVhu.24 (See SEQ ID NO: 136 in US20150315612) | AAVhu.25 (See SEQ ID NO: 49 in US20150315612) |
| AAVhu.25 (See SEQ ID NO: 146 in US20150315612) | AAVhu.26 (See SEQ ID NO: 17 in US20150159173 and SEQ ID NO: 61 in US20150315612) |
| | AAVhu.26 (See SEQ ID NO: 33 in US20150159173), US20150315612 SEQ |
| | AAVhu.27 (See SEQ ID NO: 64 in US20150315612) |
| AAVhu.27 (See SEQ ID NO: 140 in US20150315612) | AAVhu.28 (See SEQ ID NO: 68 in US20150315612) |
| AAVhu.28 (See SEQ ID NO: 130 in US20150315612) | AAVhu.29 (See SEQ ID NO: 69 in US20150315612) |
| AAVhu.29 (See SEQ ID NO: 42 in US20150159173 and SEQ ID NO: 132 in US20150315612) | |
| AAVhu.29 (See SEQ ID NO: 225 in US20150315612) | AAVhu.29R (See SEQ ID NO: in US20150159173 |
| AAVhu.3 (See SEQ ID NO: 44 in US20150315612) | AAVhu.3 (See SEQ ID NO: 145 in US20150315612) |
| AAVhu.30 (See SEQ ID NO: 70 in US20150315612) | AAVhu.30 (See SEQ ID NO: 131 in US20150315612) |
| AAVhu.31 (See SEQ ID NO: 1 in US20150315612) | AAVhu.31 (See SEQ ID NO: 121 in US20150315612) |
| AAVhu.32 (See SEQ ID NO: 2 in US20150315612) | AAVhu.32 (See SEQ ID NO: 122 in US20150315612) |
| AAVhu.33 (See SEQ ID NO: 75 in US20150315612) | AAVhu.33 (See SEQ ID NO: 124 in US20150315612) |
| AAVhu.34 (See SEQ ID NO: 72 in US20150315612) | AAVhu.34 (See SEQ ID NO: 125 in US20150315612) |
| AAVhu.35 (See SEQ ID NO: 73 in US20150315612) | AAVhu.35 (See SEQ ID NO: 164 in US20150315612) |
| AAVhu.36 (See SEQ ID NO: 74 in US20150315612) | AAVhu.36 (See SEQ ID NO: 126 in US20150315612) |
| AAVhu.37 (See SEQ ID NO: 34 in US20150159173 and SEQ ID NO: 88 in US20150315612) | |
| AAVhu.37 (AAV106.1) (See SEQ ID NO: 10 in US20150315612 and SEQ ID NO: 18 in US20150159173) | |
| AAVhu.38 (See SEQ ID NO: 161 in US20150315612) | AAVhu.39 (See SEQ ID NO: 102 in US20150315612) |
| AAVhu.39 (AAVLG-9) (See SEQ ID NO: 24 in US20150315612) | AAVhu.4 (See SEQ ID NO: 47 in US20150315612) |
| AAVhu.4 (See SEQ ID NO: 141 in US20150315612) | AAVhu.40 (See SEQ ID NO: 87 in US20150315612) |
| AAVhu.40 (AAV114.3) (See SEQ ID NO: 11 in US20150315612) | AAVhu.41 (See SEQ ID NO: 91 in US20150315612) |
| AAVhu.41 (AAV127.2) (See SEQ ID NO: 6 in US20150315612) | AAVhu.42 (See SEQ ID NO: 85 in US20150315612) |
| AAVhu.42 (AAV127.5) (See SEQ ID NO:8 in US20150315612) | AAVhu.43 (See SEQ ID NO: 160 in US20150315612) |
| AAVhu.43 (See SEQ ID NO: 236 in US20150315612) | AAVhu.43 (AAV128.1) (See SEQ ID NO: 80 in US20150315612) |
| AAVhu.44 (See SEQ ID NO: 45 in US20150159173 and SEQ ID NO: 158 in US20150315612) | |
| AAVhu.44 (AAV128.3) (See SEQ ID NO: 81 in US20150315612) | AAVhu.44Rl (See SEQ ID NO: in US20150159173 |
| AAVhu.44R2 (See SEQ ID NO: in US20150159173 | AAVhu.44R3 (See SEQ ID NO: in US20150159173 |
| AAVhu.45 (See SEQ ID NO: 76 in US20150315612) | AAVhu.45 (See SEQ ID NO: 127 in US20150315612) |
| AAVhu.46 (See SEQ ID NO: 82 in US20150315612) | AAVhu.46 (See SEQ ID NO: 159 in US20150315612) |
| AAVhu.46 (See SEQ ID NO: 224 in US20150315612) | AAVhu.47 (See SEQ ID NO: 77 in US20150315612) |
| AAVhu.47 (See SEQ ID NO: 128 in US20150315612) | AAVhu.48 (See SEQ ID NO: 38 in US20150159173) |
| AAVhu.48 (See SEQ ID NO: 157 in US20150315612) | AAVhu.48 (AAV130.4) (See SEQ ID NO: 78 in US20150315612) |
| AAVhu.48Rl (See SEQ ID NO: in US20150159173 | AAVhu.48R2 (See SEQ ID NO: in US20150159173 |
| AAVhu.48R3 (See SEQ ID NO: in US20150159173 | AAVhu.49 (See SEQ ID NO: 209 in US20150315612) |
| AAVhu.49 (See SEQ ID NO: 189 in US20150315612) | AAVhu.5 (See SEQ ID NO: 45 in US20150315612) |
| AAVhu.5 (See SEQ ID NO: 142 in US20150315612) | AAVhu.51 (See SEQ ID NO: 208 in US20150315612) |
| AAVhu.51 (See SEQ ID NO: 190 in US20150315612) | AAVhu.52 (See SEQ ID NO: 210 in US20150315612) |
| AAVhu.52 (See SEQ ID NO: 191 in US20150315612) | AAVhu.53 (See SEQ ID NO: 19 in US20150159173) |
| AAVhu.53 (See SEQ ID NO: 35 in US20150159173) | AAVhu.53 (AAV145.1) (See SEQ ID NO: 176 in US20150315612) |
| AAVhu.54 (See SEQ ID NO: 188 in US20150315612) | AAVhu.54 (AAV145.5) (See SEQ ID NO: 177 in US20150315612) |
| AAVhu.55 (See SEQ ID NO: 187 in US20150315612) | AAVhu.56 (See SEQ ID NO: 205 in US20150315612) |
| AAVhu.56 (AAV 145.6) (See SEQ ID NO: 168 in US20150315612) | AAVhu.56 (AAV145.6) (See SEQ ID NO: 192 in US20150315612) |
| AAVhu.57 (See SEQ ID NO: 206 in US20150315612) | AAVhu.57 (See SEQ ID NO: 169 in US20150315612) |
| AAVhu.57 (See SEQ ID NO: 193 in US20150315612) | AAVhu.58 (See SEQ ID NO: 207 in US20150315612) |
| AAVhu.58 (See SEQ ID NO: 194 in US20150315612) | AAVhu.6 (AAV3.1) (See SEQ ID NO: 5 in US20150315612) |
| AAVhu.6 (AAV3.1) (See SEQ ID NO: 84 in US20150315612) | AAVhu.60 (See SEQ ID NO: 184 in US20150315612) |
| AAVhu.60 (AAV161.10) (See SEQ ID NO: 170 in US20150315612) | AAVhu.61 (See SEQ ID NO: 185 in US20150315612) |
| AAVhu.61 (AAV161.6) (See SEQ ID NO: 174 in US20150315612) | AAVhu.63 (See SEQ ID NO: 204 in US20150315612) |
| AAVhu.63 (See SEQ ID NO: 195 in US20150315612) | AAVhu.64 (See SEQ ID NO: 212 in US20150315612) |
| AAVhu.64 (See SEQ ID NO: 196 in US20150315612) | AAVhu.66 (See SEQ ID NO: 197 in US20150315612) |
| AAVhu.67 (See SEQ ID NO: 215 in US20150315612) | AAVhu.67 (See SEQ ID NO: 198 in US20150315612) |
| AAVhu.7 (See SEQ ID NO: 226 in US20150315612) | AAVhu.7 (See SEQ ID NO: 150 in US20150315612) |
| AAVhu.7 (AAV7.3) (See SEQ ID NO: 55 in US20150315612) | AAVhu.71 (See SEQ ID NO: 79 in US20150315612) |
| AAVhu.8 (See SEQ ID NO: 53 in US20150315612) | AAVhu.8 (See SEQ ID NO: 12 in US20150315612) |
| AAVhu.8 (See SEQ ID NO: 151 in US20150315612) | AAVhu.9 (AAV3.1) (See SEQ ID NO: 58 in US20150315612) |
| AAVhu.9 (AAV3.1) (See SEQ ID NO: 155 in US20150315612) | AAV-LK01 (See SEQ ID NO: 2 in US20150376607) |
| AAV-LK01 (See SEQ ID NO: 29 in US20150376607) | AAV-LK02 (See SEQ ID NO: 3 in US20150376607) |
| AAV-LK02 (See SEQ ID NO: 30 in US20150376607) | AAV-LK03 (See SEQ ID NO: 4 in US20150376607) |
| AAV-LK03 (See SEQ ID NO: 12 in WO2015121501 and SEQ ID NO: 31 in US20150376607) | |
| AAV-LK04 (See SEQ ID NO: 5 in US20150376607) | AAV-LK04 (See SEQ ID NO: 32 in US20150376607) |
| AAV-LK05 (See SEQ ID NO: 6 in US20150376607) | AAV-LK05 (See SEQ ID NO: 33 in US20150376607) |
| AAV-LK06 (See SEQ ID NO: 7 in US20150376607) | AAV-LK06 (See SEQ ID NO: 34 in US20150376607) |
| AAV-LK07 (See SEQ ID NO: 8 in US20150376607) | AAV-LK07 (See SEQ ID NO: 35 in US20150376607) |
| AAV-LK08 (See SEQ ID NO: 9 in US20150376607) | AAV-LK08 (See SEQ ID NO: 36 in US20150376607) |
| AAV-LK09 (See SEQ ID NO: 10 in US20150376607) | AAV-LK09 (See SEQ ID NO: 37 in US20150376607) |
| AAV-LK10 (See SEQ ID NO: 11 in US20150376607) | AAV-LK10 (See SEQ ID NO: 38 in US20150376607) |
| AAV-LK11 (See SEQ ID NO: 12 in US20150376607) | AAV-LK11 (See SEQ ID NO: 39 in US20150376607) |
| AAV-LK12 (See SEQ ID NO: 13 in US20150376607) | AAV-LK12 (See SEQ ID NO: 40 in US20150376607) |
| AAV-LK13 (See SEQ ID NO: 14 in US20150376607) | AAV-LK13 (See SEQ ID NO: 41 in US20150376607) |
| AAV-LK14 (See SEQ ID NO: 15 in US20150376607) | AAV-LK14 (See SEQ ID NO: 42 in US20150376607) |
| AAV-LK15 (See SEQ ID NO: 16 in US20150376607) | AAV-LK15 (See SEQ ID NO: 43 in US20150376607) |
| AAV-LK16 (See SEQ ID NO: 17 in US20150376607) | AAV-LK16 (See SEQ ID NO: 44 in US20150376607) |
| AAV-LK17 (See SEQ ID NO: 18 in US20150376607) | AAV-LK17 (See SEQ ID NO: 45 in US20150376607) |
| AAV-LK18 (See SEQ ID NO: 19 in US20150376607) | AAV-LK18 (See SEQ ID NO: 46 in US20150376607) |
| AAV-LK19 (See SEQ ID NO: 20 in US20150376607) | AAV-LK19 (See SEQ ID NO: 47 in US20150376607) |
| AAV-PAEC (See SEQ ID NO: 1 in US20150376607) | AAV-PAEC (See SEQ ID NO: 48 in US20150376607) |
| AAV-PAEC11 (See SEQ ID NO: 26 in US20150376607) | AAV-PAEC11 (See SEQ ID NO: 54 in US20150376607) |
| AAV-PAEC 12 (See SEQ ID NO: 27 in US20150376607) | AAV-PAEC 12 (See SEQ ID NO: 51 in US20150376607) |
| AAV-PAEC 13 (See SEQ ID NO: 28 in US20150376607) | AAV-PAEC 13 (See SEQ ID NO: 49 in US20150376607) |
| AAV-PAEC2 (See SEQ ID NO: 21 in US20150376607) | AAV-PAEC2 (See SEQ ID NO: 56 in US20150376607) |
| AAV-PAEC4 (See SEQ ID NO: 22 in US20150376607) | AAV-PAEC4 (See SEQ ID NO: 55 in US20150376607) |
| AAV-PAEC6 (See SEQ ID NO: 23 in US20150376607) | AAV-PAEC6 (See SEQ ID NO: 52 in US20150376607) |
| AAV-PAEC7 (See SEQ ID NO: 24 in US20150376607) | AAV-PAEC7 (See SEQ ID NO: 53 in US20150376607) |
| AAV-PAEC8 (See SEQ ID NO: 25 in US20150376607) | AAV-PAEC8 (See SEQ ID NO: 50 in US20150376607) |
| AAVpi.l (See SEQ ID NO: 28 in US20150315612) | AAVpi.l (See SEQ ID NO: 93 in US20150315612; AAVpi.2 408, see SEQ ID NO: 30 in US20150315612) |
| AAVpi.2 (See SEQ ID NO: 95 in US20150315612) | AAVpi.3 (See SEQ ID NO: 29 in US20150315612) |
| AAVpi.3 (See SEQ ID NO: 94 in US20150315612) | AAVrh.10 (See SEQ ID NO: 9 in US20150159173) |
| AAVrh.10 (See SEQ ID NO: 25 in US20150159173) | AAV44.2 (See SEQ ID NO: 59 in US20030138772) |
| AAVrh.10 (AAV44.2) (See SEQ ID NO: 81 in US20030138772) | AAV42.1B (See SEQ ID NO: 90 in US20030138772) |
| AAVrh.l2 (AAV42.1b) (See SEQ ID NO: 30 in US20030138772) | AAVrh.13 (See SEQ ID NO: 10 in US20150159173) |
| AAVrh.13 (See SEQ ID NO: 26 in US20150159173) | AAVrh.13 (See SEQ ID NO: 228 in US20150315612) |
| AAVrh.13R (See SEQ ID NO: in US20150159173 | AAV42.3A (See SEQ ID NO: 87 in US20030138772) |
| AAVrh.14 (AAV42.3a) (See SEQ ID NO: 32 in US20030138772) | AAV42.5A (See SEQ ID NO: 89 in US20030138772) |
| AAVrh.17 (AAV42.5a) (See SEQ ID NO: 34 in US20030138772) | AAV42.5B (See SEQ ID NO: 91 in US20030138772) |
| AAVrh.18 (AAV42.5b) (See SEQ ID NO: 29 in US20030138772) | AAV42.6B (See SEQ ID NO: 112 in US20030138772) |
| AAVrh.19 (AAV42.6b) (See SEQ ID NO: 38 in US20030138772) | AAVrh.2 (See SEQ ID NO: 39 in US20150159173) |
| AAVrh.2 (See SEQ ID NO: 231 in US20150315612) | AAVrh.20 (See SEQ ID NO: 1 in US20150159173) |
| AAV42.10 (See SEQ ID NO: 106 in US20030138772) | AAVrh.21 (AAV42.10) (See SEQ ID NO: 35 in US20030138772) |
| AAV42.11 (See SEQ ID NO: 108 in US20030138772) | AAVrh.22 (AAV42.11) (See SEQ ID NO: 37 in US20030138772) |
| AAV42.12 (See SEQ ID NO: 113 in US20030138772) | AAVrh.23 (AAV42.12) (See SEQ ID NO: 58 in US20030138772) |
| AAV42.13 (See SEQ ID NO: 86 in US20030138772) | AAVrh.24 (AAV42.13) (See SEQ ID NO: 31 in US20030138772) |
| AAV42.15 (See SEQ ID NO: 84 in US20030138772) | AAVrh.25 (AAV42.15) (See SEQ ID NO: 28 in US20030138772) |
| AAVrh.2R (See SEQ ID NO: in US20150159173 | AAVrh.31 (AAV223.1) (See SEQ ID NO: 48 in US20030138772) |
| AAVC1 (See SEQ ID NO: 60 in US20030138772) | AAVrh.32 (AAVC1) (See SEQ ID NO: 19 in 446 US20030138772) |
| AAVrh.32/33 (See SEQ ID NO: 2 in US20150159173) | AAVrh.51 (AAV2-5) (See SEQ ID NO: 104 in US20150315612) |
| AAVrh.52 (AAV3-9) (See SEQ ID NO: 18 in US20150315612) | AAVrh.52 (AAV3-9) (See SEQ ID NO: 96 in US20150315612) |
| AAVrh.53 (See SEQ ID NO: in US20150315612) | AAVrh.53 (AAV3-11) (See SEQ ID NO: 17 in US20150315612) |
| AAVrh.53 (AAV3-11) (See SEQ ID NO: 186 in US20150315612) | AAVrh.54 (See SEQ ID NO: 40 in US20150315612) |
| AAVrh.54 (See SEQ ID NO: 49 in US20150159173 and SEQ ID NO: 116 in US20150315612) | |
| AAVrh.55 (See SEQ ID NO: 37 in US20150315612) | AAVrh.55 (AAV4-19) (See SEQ ID NO: 117 in US20150315612) |
| AAVrh.56 (See SEQ ID NO: 54 in US20150315612) | AAVrh.56 (See SEQ ID NO: 152 in US20150315612) |
| AAVrh.57 (See SEQ ID NO: in 497 US20150315612 SEQ ID NO: 26 | AAVrh.57 (See SEQ ID NO: 105 in US20150315612) |
| AAVrh.58 (See SEQ ID NO: 27 in US20150315612) | AAVrh.58 (See SEQ ID NO: 48 in US20150159173 and SEQ ID NO: 106 in US20150315612) |
| | AAVrh.58 (See SEQ ID NO: 232 in US20150315612) |
| AAVrh.59 (See SEQ ID NO: 42 in US20150315612) | AAVrh.59 (See SEQ ID NO: 110 in US20150315612) |
| AAVrh.60 (See SEQ ID NO: 31 in US20150315612) | AAVrh.60 (See SEQ ID NO: 120 in US20150315612) |
| AAVrh.61 (See SEQ ID NO: 107 in US20150315612) | AAVrh.61 (AAV2-3) (See SEQ ID NO: 21 in US20150315612) |
| AAVrh.62 (AAV2-15) (See SEQ ID NO: 33 in US20150315612) | AAVrh.62 (AAV2-15) (See SEQ ID NO: 114 in US20150315612) |
| AAVrh.64 (See SEQ ID NO: 15 in US20150315612) | AAVrh.64 (See SEQ ID NO: 43 in US20150159173 and SEQ ID NO: 99 in US20150315612) |
| | AAVrh.64 (See SEQ ID NO: 233 in US20150315612) |
| AAVRh.64Rl (See SEQ ID NO: in US20150159173 | AAVRh.64R2 (See SEQ ID NO: in US20150159173 |
| AAVrh.65 (See SEQ ID NO: 35 in US20150315612) | AAVrh.65 (See SEQ ID NO: 112 in US20150315612) |
| AAVrh.67 (See SEQ ID NO: 36 in US20150315612) | AAVrh.67 (See SEQ ID NO: 230 in US20150315612) |
| AAVrh.67 (See SEQ ID NO: 47 in US20150159173 and SEQ ID NO: 47 in US20150315612) | |
| AAVrh.68 (See SEQ ID NO: 16 in US20150315612) | AAVrh.68 (See SEQ ID NO: 100 in US20150315612) |
| AAVrh.69 (See SEQ ID NO: 39 in US20150315612) | AAVrh.69 (See SEQ ID NO: 119 in US20150315612) |
| AAVrh.70 (See SEQ ID NO: 20 in US20150315612) | AAVrh.70 (See SEQ ID NO: 98 in US20150315612) |
| AAVrh.71 (See SEQ ID NO: 162 in US20150315612) | AAVrh.72 (See SEQ ID NO: 9 in US20150315612) |
| AAVrh.73 (See SEQ ID NO: 5 in US20150159173) | AAVrh.74 (See SEQ ID NO: 6 in US20150159173) |
| AAVrh.8 (See SEQ ID NO: 41 in US20150159173) | AAVrh.8 (See SEQ ID NO: 235 in US20150315612) |
| AAVrh.8R (See SEQ ID NO: 9 in US20150159173, WO2015168666) | AAVrh.8R A586R mutant (See SEQ ID NO: 10 in WO2015168666) |
| AAVrh.8R R533A mutant (See SEQ ID NO: 11 in WO2015168666) | BAAV (bovine AAV) (See SEQ ID NO: 8 in US9193769) |
| BAAV (bovine AAV) (See SEQ ID NO: 10 in US9193769) | BAAV (bovine AAV) (See SEQ ID NO: 4 in US9193769) |
| BAAV (bovine AAV) (See SEQ ID NO: 2 in US9193769) | BAAV (bovine AAV) (See SEQ ID NO: 6 in US9193769) |
| BAAV (bovine AAV) (See SEQ ID NO: 1 in US9193769) | BAAV (bovine AAV) (See SEQ ID NO: 5 in US9193769) |
| BAAV (bovine AAV) (See SEQ ID NO: 3 in US9193769) | BAAV (bovine AAV) (See SEQ ID NO: 11 in US9193769) |
| BAAV (bovine AAV) (See SEQ ID NO: 5 in US7427396) | BAAV (bovine AAV) (See SEQ ID NO: 6 in US7427396) |
| BAAV (bovine AAV) (See SEQ ID NO: 7 in US9193769) | BAAV (bovine AAV) (See SEQ ID NO: 9 in US9193769) |
| BNP61 AAV (See SEQ ID NO: 1 in US20150238550) | BNP61 AAV (See SEQ ID NO: 2 in US20150238550) |
| BNP62 AAV (See SEQ ID NO: 3 in US20150238550) | BNP63 AAV (See SEQ ID NO: 4 in US20150238550) |
| caprine AAV (See SEQ ID NO: 3 in US7427396) | caprine AAV (See SEQ ID NO: 4 in US7427396) |
| true type AAV (ttAAV) (See SEQ ID NO: 2 in WO2015121501) | AAAV (Avian AAV) (See SEQ ID NO: 12 in US9238800) |
| AAAV (Avian AAV) (See SEQ ID NO: 2 in US9238800) | AAAV (Avian AAV) (See SEQ ID NO: 6 in US9238800) |
| AAAV (Avian AAV) (See SEQ ID NO: 4 in US9238800) | AAAV (Avian AAV) (See SEQ ID NO: 8 in US9238800) |
| AAAV (Avian AAV) (See SEQ ID NO: 14 in US9238800) | AAAV (Avian AAV) (See SEQ ID NO: 10 in US9238800) |
| AAAV (Avian AAV) (See SEQ ID NO: 15 in US9238800) | AAAV (Avian AAV) (See SEQ ID NO: 5 in US9238800) |
| AAAV (Avian AAV) (See SEQ ID NO: 9 in US9238800) | AAAV (Avian AAV) (See SEQ ID NO: 3 in US9238800) |
| AAAV (Avian AAV) (See SEQ ID NO: 7 in US9238800) | AAAV (Avian AAV) (See SEQ ID NO: 11 in US9238800) |
| AAAV (Avian AAV) (See SEQ ID NO: in US9238800) | AAAV (Avian AAV) (See SEQ ID NO: 1 in US9238800) |
| AAV Shuffle 100-1 (See SEQ ID NO: 23 in US20160017295) | AAV Shuffle 100-1 (See SEQ ID NO: 11 in US20160017295) |
| AAV Shuffle 100-2 (See SEQ ID NO: 37 in US20160017295) | AAV Shuffle 100-2 (See SEQ ID NO: 29 in US20160017295) |
| AAV Shuffle 100-3 (See SEQ ID NO: 24 in US20160017295) | AAV Shuffle 100-3 (See SEQ ID NO: 12 in US20160017295) |
| AAV Shuffle 100-7 (See SEQ ID NO: 25 in US20160017295) | AAV Shuffle 100-7 (See SEQ ID NO: 13 in US20160017295) |
| AAV Shuffle 10-2 (See SEQ ID NO: 34 in US20160017295) | AAV Shuffle 10-2 (See SEQ ID NO: 26 in US20160017295) |
| AAV Shuffle 10-6 (See SEQ ID NO: 35 in US20160017295) | AAV Shuffle 10-6 (See SEQ ID NO: 27 in US20160017295) |
| AAV Shuffle 10-8 (See SEQ ID NO: 36 in US20160017295) | AAV Shuffle 10-8 (See SEQ ID NO: 28 in US20160017295) |
| AAV SM 100-10 (See SEQ ID NO: 41 in US20160017295) | AAV SM 100-10 (See SEQ ID NO: 33 in US20160017295) |
| AAV SM 100-3 (See SEQ ID NO: 40 in US20160017295) | AAV SM 100-3 (See SEQ ID NO: 32 in US20160017295) |
| AAV SM 10-1 (See SEQ ID NO: 38 in US20160017295) | AAV SM 10-1 (See SEQ ID NO: 30 in US20160017295) |
| AAV SM 10-2 (See SEQ ID NO: 10 in US20160017295) | AAV SM 10-2 (See SEQ ID NO: 22 in US20160017295) |
| AAV SM 10-8 (See SEQ ID NO: 39 in US20160017295) | AAV SM 10-8 (See SEQ ID NO: 31 in US20160017295) |
| AAV CBr-7.1 (See SEQ ID NO: 4 in WO2016065001) | AAV CBr-7.1 (See SEQ ID NO: 54 in WO2016065001) |
| AAV CBr-7.10 (See SEQ ID NO: 11 in WO2016065001) | AAV CBr-7.10 (See SEQ ID NO: 61 in WO2016065001) |
| AAV CBr-7.2 (See SEQ ID NO: 5 in WO2016065001) | AAV CBr-7.2 (See SEQ ID NO: 55 in WO2016065001) |
| AAV CBr-7.3 (See SEQ ID NO: 6 in WO2016065001) | AAV CBr-7.3 (See SEQ ID NO: 56 in WO2016065001) |
| AAV CBr-7.4 (See SEQ ID NO: 7 in WO2016065001) | AAV CBr-7.4 (See SEQ ID NO: 57 in WO2016065001) |
| AAV CBr-7.5 (See SEQ ID NO: 8 in WO2016065001) | AAV CHt-6.6 (See SEQ ID NO: 35 in WO2016065001) |
| AAV CHt-6.6 (See SEQ ID NO: 85 in WO2016065001) | AAV CHt-6.7 (See SEQ ID NO: 36 in WO2016065001) |
| AAV CHt-6.7 (See SEQ ID NO: 86 in WO2016065001) | AAV CHt-6.8 (See SEQ ID NO: 37 in WO2016065001) |
| AAV CHt-6.8 (See SEQ ID NO: 87 in WO2016065001) | AAV CHt-P1 (See SEQ ID NO: 29 in WO2016065001) |
| AAV CHt-Pl (See SEQ ID NO: 79 in WO2016065001) | AAV CHt-P2 (See SEQ ID NO: 1 in WO2016065001) |
| AAV CHt-P2 (See SEQ ID NO: 51 in WO2016065001) | AAV CHt-P5 (See SEQ ID NO: 2 in WO2016065001) |
| AAV CHt-P5 (See SEQ ID NO: 52 in WO2016065001) | AAV CHt-P6 (See SEQ ID NO: 30 in WO2016065001) |
| AAV CHt-P6 (See SEQ ID NO: 80 in WO2016065001) | AAV CHt-P8 (See SEQ ID NO: 31 in WO2016065001) |
| AAV CHt-P8 (See SEQ ID NO: 81 in WO2016065001) | AAV CHt-P9 (See SEQ ID NO: 3 in WO2016065001) |
| AAV CHt-P9 (See SEQ ID NO: 53 in WO2016065001) | AAV CKd-1 (See SEQ ID NO: 57 in US8734809) |
| AAV CKd-1 (See SEQ ID NO: 131 in US8734809) | AAV CKd-10 (See SEQ ID NO: 58 in US8734809) |
| AAV CKd-10 (See SEQ ID NO: 132 in US8734809) | AAV CKd-2 (See SEQ ID NO: 59 in US8734809) |
| AAV CKd-2 (See SEQ ID NO: 133 in US8734809) | AAV CKd-3 (See SEQ ID NO: 60 in US8734809) |
| AAV CKd-3 (See SEQ ID NO: 134 in US8734809) | AAV CKd-4 (See SEQ ID NO: 61 in US8734809) |
| AAV CKd-4 (See SEQ ID NO: 135 in US8734809) | AAV CKd-6 (See SEQ ID NO: 62 in US8734809) |
| AAV CKd-6 (See SEQ ID NO: 136 in US8734809) | AAV CKd-7 (See SEQ ID NO: 63 in US8734809) |
| AAV CKd-7 (See SEQ ID NO: 137 in US8734809) | AAV CKd-8 (See SEQ ID NO: 64 in US8734809) |
| AAV CKd-8 (See SEQ ID NO: 138 in US8734809) | AAV CKd-B 1 (See SEQ ID NO: 73 in US8734809) |
| AAV CKd-B 1 (See SEQ ID NO: 147 in US8734809) | AAV CKd-B2 (See SEQ ID NO: 74 in US8734809) |
| AAV CKd-B2 (See SEQ ID NO: 148 in US8734809) | AAV CKd-B3 (See SEQ ID NO: 75 in US8734809) |
| AAV CKd-B3 (See SEQ ID NO: in US8734809 | AAV CKd-B3 (See SEQ ID NO: 149 in US8734809) |
| AAV CLv-1 (See SEQ ID NO: 65 in US8734809) | AAV CLv-1 (See SEQ ID NO: 139 in US8734809) |
| AAV CLvl-1 (See SEQ ID NO: 171 in US8734809) | AAV Civ 1-10 (See SEQ ID NO: 178 in US8734809) |
| AAV CLvl-2 (See SEQ ID NO: 172 in US8734809) | AAV CLv-12 (See SEQ ID NO: 66 in US8734809) |
| AAV CLv-12 (See SEQ ID NO: 140 in US8734809) | AAV CLvl-3 (See SEQ ID NO: 173 in US8734809) |
| AAV CLv-13 (See SEQ ID NO: 67 in US8734809) | AAV CLv-13 (See SEQ ID NO: 141 in US8734809) |
| AAV CLvl-4 (See SEQ ID NO: 174 in US8734809) | AAV Civ 1-7 (See SEQ ID NO: 175 in US8734809) |
| AAV Civ 1-8 (See SEQ ID NO: 176 in US8734809) | AAV Civ 1-9 (See SEQ ID NO: 177 in US8734809) |
| AAV CLv-2 (See SEQ ID NO: 68 in US8734809) | AAV CLv-2 (See SEQ ID NO: 142 in US8734809) |
| AAV CLv-3 (See SEQ ID NO: 69 in US8734809) | AAV CLv-3 (See SEQ ID NO: 143 in US8734809) |
| AAV CLv-4 (See SEQ ID NO: 70 in US8734809) | AAV CLv-4 (See SEQ ID NO: 144 in US8734809) |
| AAV CLv-6 (See SEQ ID NO: 71 in US8734809) | AAV CLv-6 (See SEQ ID NO: 145 in US8734809) |
| AAV CLv-8 (See SEQ ID NO: 72 in US8734809) | AAV CLv-8 (See SEQ ID NO: 146 in US8734809) |
| AAV CLv-Dl (See SEQ ID NO: 22 in US8734809) | AAV CLv-Dl (See SEQ ID NO: 96 in US8734809) |
| AAV CLv-D2 (See SEQ ID NO: 23 in US8734809) | AAV CLv-D2 (See SEQ ID NO: 97 in US8734809) |
| AAV CLv-D3 (See SEQ ID NO: 24 in US8734809) | AAV CLv-D3 (See SEQ ID NO: 98 in US8734809) |
| AAV CLv-D4 (See SEQ ID NO: 25 in US8734809) | AAV CLv-D4 (See SEQ ID NO: 99 in US8734809) |
| AAV CLv-D5 (See SEQ ID NO: 26 in US8734809) | AAV CLv-D5 (See SEQ ID NO: 100 in US8734809) |
| AAV CLv-D6 (See SEQ ID NO: 27 in US8734809) | AAV CLv-D6 (See SEQ ID NO: 101 in US8734809) |
| AAV CLv-D7 (See SEQ ID NO: 28 in US8734809) | AAV CLv-D7 (See SEQ ID NO: 102 in US8734809) |
| AAV CLv-D8 (See SEQ ID NO: 29 in US8734809) | AAV CLv-D8 (See SEQ ID NO: 103 in US8734809); AAV CLv-Kl 762, see SEQ ID NO: 18 in WO2016065001) |
| AAV CLv-Kl (See SEQ ID NO: 68 in WO2016065001) | AAV CLv-K3 (See SEQ ID NO: 19 in WO2016065001) |
| AAV CLv-K3 (See SEQ ID NO: 69 in WO2016065001) | AAV CLv-K6 (See SEQ ID NO: 20 in WO2016065001) |
| AAV CLv-K6 (See SEQ ID NO: 70 in WO2016065001) | AAV CLv-L4 (See SEQ ID NO: 15 in WO2016065001) |
| AAV CLv-L4 (See SEQ ID NO: 65 in WO2016065001) | AAV CLv-L5 (See SEQ ID NO: 16 in WO2016065001) |
| AAV CLv-L5 (See SEQ ID NO: 66 in WO2016065001) | AAV CLv-L6 (See SEQ ID NO: 17 in WO2016065001) |
| AAV CLv-L6 (See SEQ ID NO: 67 in WO2016065001) | AAV CLv-Ml (See SEQ ID NO: 21 in WO2016065001) |
| AAV CLv-Ml (See SEQ ID NO: 71 in WO2016065001) | AAV CLv-Mll (See SEQ ID NO: 22 in WO2016065001) |
| AAV CLv-Ml 1 (See SEQ ID NO: 72 in WO2016065001) | AAV CLv-M2 (See SEQ ID NO: 23 in WO2016065001) |
| AAV CLv-M2 (See SEQ ID NO: 73 in WO2016065001) | AAV CLv-M5 (See SEQ ID NO: 24 in WO2016065001) |
| AAV CLv-M5 (See SEQ ID NO: 74 in WO2016065001) | AAV CLv-M6 (See SEQ ID NO: 25 in WO2016065001) |
| AAV CLv-M6 (See SEQ ID NO: 75 in WO2016065001) | AAV CLv-M7 (See SEQ ID NO: 26 in WO2016065001) |
| AAV CLv-M7 (See SEQ ID NO: 76 in WO2016065001) | AAV CLv-M8 (See SEQ ID NO: 27 in WO2016065001) |
| AAV CLv-M8 (See SEQ ID NO: 77 in WO2016065001) | AAV CLv-M9 (See SEQ ID NO: 28 in WO2016065001) |
| AAV CLv-M9 (See SEQ ID NO: 78 in WO2016065001) | AAV CLv-Rl (See SEQ ID NO: 30 in US8734809) |
| AAV CLv-RJ (See SEQ ID NO: 104 in US8734809) | AAV CLv-R2 (See SEQ ID NO: 31 in US8734809) |
| AAV CLv-R2 (See SEQ ID NO: 105 in US8734809) | AAV CLv-R3 (See SEQ ID NO: 32 in US8734809) |
| AAV CLv-R3 (See SEQ ID NO: 106 in US8734809) | AAV CLv-R4 (See SEQ ID NO: 33 in US8734809) |
| AAV CLv-R4 (See SEQ ID NO: 107 in US8734809) | AAV CLv-R5 (See SEQ ID NO: 34 in US8734809) |
| AAV CLv-R5 (See SEQ ID NO: 108 in US8734809) | AAV CLv-R6 (See SEQ ID NO: 35 in US8734809) |
| AAV CLv-R6 (See SEQ ID NO: 109 in US8734809); AAV CLv-R7 802 (see SEQ ID NO: 36 in US8734809) | AAV CLv-R7 (See SEQ ID NO: 110 in US8734809) |
| AAV CLv-R8 (See SEQ ID NO: 37 in US8734809) | AAV CLv-R8 (See SEQ ID NO: 111 in US8734809) |
| AAV CLv-R9 (See SEQ ID NO: 38 in US8734809) | AAV CLv-R9 (See SEQ ID NO: 112 in US8734809) |
| AAV CSp-1 (See SEQ ID NO: 45 in US8734809) | AAV CSp-1 (See SEQ ID NO: 119 in US8734809) |
| AAV CSp-10 (See SEQ ID NO: 46 in US8734809) | AAV CSp-10 (See SEQ ID NO: 120 in US8734809) |
| AAV CSp-11 (See SEQ ID NO: 47 in US8734809) | AAV CSp-11 (See SEQ ID NO: 121 in US8734809) |
| AAV CSp-2 (See SEQ ID NO: 48 in US8734809) | AAV CSp-2 (See SEQ ID NO: 122 in US8734809) |
| AAV CSp-3 (See SEQ ID NO: 49 in US8734809) | AAV CSp-3 (See SEQ ID NO: 123 in US8734809) |
| AAV CSp-4 (See SEQ ID NO: 50 in US8734809) | AAV CSp-4 (See SEQ ID NO: 124 in US8734809) |
| AAV CSp-6 (See SEQ ID NO: 51 in US8734809) | AAV CSp-6 (See SEQ ID NO: 125 in US8734809) |
| AAV CSp-7 (See SEQ ID NO: 52 in US8734809) | AAV CSp-7 (See SEQ ID NO: 126 in US8734809) |
| AAV CSp-8 (See SEQ ID NO: 53 in US8734809) | AAV CSp-8 (See SEQ ID NO: 127 in US8734809) |
| AAV CSp-8.10 (See SEQ ID NO: 38 in WO2016065001) | AAV CSp-8.10 (See SEQ ID NO: 88 in WO2016065001) |
| AAV CSp-8.2 (See SEQ ID NO: 39 in WO2016065001) | AAV CSp-8.2 (See SEQ ID NO: 89 in WO2016065001) |
| AAV CSp-8.4 (See SEQ ID NO: 40 in WO2016065001) | AAV CSp-8.4 (See SEQ ID NO: 90 in WO2016065001) |
| AAV CSp-8.5 (See SEQ ID NO: 41 in WO2016065001) | AAV CSp-8.5 (See SEQ ID NO: 91 in WO2016065001) |
| AAV CSp-8.6 (See SEQ ID NO: 42 in WO2016065001) | AAV CSp-8.6 (See SEQ ID NO: 92 in WO2016065001) |
| AAV CSp-8.7 (See SEQ ID NO: 43 in WO2016065001) | AAV CSp-8.7 (See SEQ ID NO: 93 in WO2016065001) |
| AAV CSp-8.8 (See SEQ ID NO: 44 in WO2016065001) | AAV CSp-8.8 (See SEQ ID NO: 94 in WO2016065001) |
| AAV CSp-8.9 (See SEQ ID NO: 45 in WO2016065001) | AAV CSp-8.9 (See SEQ ID NO: 95 in WO2016065001) |
| AAV CSp-9 842 (See SEQ ID NO: 54 in US8734809) | AAV CSp-9 (See SEQ ID NO: 128 in US8734809) |
| AAV.hu.48R3 (See SEQ ID NO: 183 in US8734809) | AAV.VR-355 (See SEQ ID NO: 181 in US8734809) |
| AAV3B (See SEQ ID NO: 48 in WO2016065001) | AAV3B (See SEQ ID NO: 98 in WO2016065001) |
| AAV4 (See SEQ ID NO: 49 in WO2016065001) | AAV4 (See SEQ ID NO: 99 in WO2016065001) |
| AAV5 (See SEQ ID NO: 50 in WO2016065001) | AAV5 (See SEQ ID NO: 100 in WO2016065001) |
| AAVF1/HSC1 (See SEQ ID NO: 20 in WO2016049230) | AAVF1/HSC1 (See SEQ ID NO: 2 in WO2016049230) |
| AAVF11/HSC11 (See SEQ ID NO: 26 in WO2016049230) | AAVF11/HSC11 (See SEQ ID NO: 4 in WO2016049230) |
| AAVF12/HSC12 (See SEQ ID NO: 30 in WO2016049230) | AAVF12/HSC12 (See SEQ ID NO: 12 in WO2016049230) |
| AAVF13/HSC13 (See SEQ ID NO: 31 in WO2016049230) | AAVF13/HSC13 (See SEQ ID NO: 14 in WO2016049230) |
| AAVF14/HSC14 (See SEQ ID NO: 32 in WO2016049230) | AAVF14/HSC14 (See SEQ ID NO: 15 in WO2016049230) |
| AAVF15/HSC15 (See SEQ ID NO: 33 in WO2016049230) | AAVF15/HSC15 (See SEQ ID NO: 16 in WO2016049230) |
| AAVF16/HSC16 (See SEQ ID NO: 34 in WO2016049230) | AAVF16/HSC16 (See SEQ ID NO: 17 in WO2016049230) |
| AAVF17/HSC17 (See SEQ ID NO: 35 in WO2016049230) | AAVF17/HSC17 (See SEQ ID NO: 13 in WO2016049230) |
| AAVF2/HSC2 (See SEQ ID NO: 21 in WO2016049230) | AAVF2/HSC2 (See SEQ ID NO: 3 in WO2016049230) |
| AAVF3/HSC3 (See SEQ ID NO: 22 in WO2016049230) | AAVF3/HSC3 (See SEQ ID NO: 5 in WO2016049230) |
| AAVF4/HSC4 (See SEQ ID NO: 23 in WO2016049230) | AAVF4/HSC4 (See SEQ ID NO: 6 in WO2016049230) |
| AAVF5/HSC5 (See SEQ ID NO: 25 in WO2016049230) | AAVF5/HSC5 (See SEQ ID NO: 11 in WO2016049230) |
| AAVF6/HSC6 (See SEQ ID NO: 24 in WO2016049230) | AAVF6/HSC6 (See SEQ ID NO: 7 in WO2016049230) |
| AAVF7/HSC7 (See SEQ ID NO: 27 in WO2016049230) | AAVF7/HSC7 (See SEQ ID NO: 8 in WO2016049230) |
| AAVF8/HSC8 (See SEQ ID NO: 28 in WO2016049230) | AAVF8/HSC8 (See SEQ ID NO:9 in WO2016049230) |
| AAVF9/HSC9 (See SEQ ID NO: 10 in WO2016049230) | AAVF9/HSC9 882 (see SEQ ID NO: 29 in WO2016049230) |
| 28m - 2vp3 (see SEQ ID NO: 139-142 in US 10,550,405, and SEQ ID NOs in WO2018/170310 or WO2019/216932) | AAV83 (see SEQ ID NO: 139-142 in US 10,550,405, and SEQ ID NOs in WO2018/170310 or WO2019/216932) |
| AAV82 (see SEQ ID NO: 139-142 in US 10,550,405, and SEQ ID NOs in WO2018/170310 or WO2019/216932) | AAV93(see SEQ ID NO: 139-142 in US 10,550,405, and SEQ ID NOs in WO2018/170310 or WO2019/216932) |
| AAV92 (see SEQ ID NO: 139-142 in US 10,550,405, and SEQ ID NOs in WO2018/170310 or WO2019/216932) | AAVrh10-3 (see SEQ ID NO: 139-142 in US 10,550,405, and SEQ ID NOs in WO2018/170310 or WO2019/216932) |
| AAV82G9 (see SEQ ID NO: 139-142 in US 10,550,405, and SEQ ID NOs in WO2018/170310 or WO2019/216932) | |

[0877] In one embodiment, the rAAV vector as disclosed herein comprises a capsid protein, associated with any of the following biological sequence files listed in the file wrappers of USPTO issued patents and published applications, which describe chimeric or variant capsid proteins that can be incorporated into the AAV capsid of this invention in any combination with wild type capsid proteins and/or other chimeric or variant capsid proteins now known or later identified (for demonstrative purposes, 11486254 corresponds to U.S. Pat. Application No. 11/486,254 and the other biological sequence files are to be read in a similar manner): 11486254.raw, 11932017.raw, 12172121.raw, 12302206.raw, 12308959.raw, 12679144.raw, 13036343.raw, 13121532.raw, 13172915.raw, 13583920.raw, 13668120.raw, 13673351.raw, 13679684.raw, 14006954.raw, 14149953.raw, 14192101.raw, 14194538.raw, 14225821.raw, 14468108.raw, 14516544.raw, 14603469.raw, 14680836.raw, 14695644.raw, 14878703.raw, 14956934.raw, 15191357.raw, 15284164.raw, 15368570.raw, 15371188.raw, 15493744.raw, 15503120.raw, 15660906.raw, and 15675677.raw.

[0878] In an embodiment, the AAV capsid proteins and virus capsids of this invention can be chimeric in that they can comprise all or a portion of a capsid subunit from another virus, optionally another parvovirus or AAV, e.g., as described in international patent publication WO 00/28004, which is incorporated by reference.

[0879] In some embodiments, an rAAV vector genome is single stranded or a monomeric duplex as described in U.S. Pat. No. 8,784,799, which is incorporated herein.

[0880] In some embodiments, the rAAV vector comprises nucleic acid that is devoid of bacterial sequence, and/or, lacks alternative open reading frames, and/or, lacks CpGs from the coding sequence, and/or, has double stranded RNA blocker or, double stranded RNA termination element. In some embodiments, the recombinant AAV of the invention is generated from closed ended linear duplexed DNA template. In some embodiments, the recombinant AAV of the invention is generated from plasmid DNA template.

[0881] In some embodiments, the recombinant AAV is produced from plasmid DNA. In some embodiments, the recombinant AAV is produced form close ended linear duplexed DNA. Closed linear DNA molecules typically comprise covalently closed ends also described as hairpin loops, where base-pairing between complementary DNA strands is not present. The hairpin loops join the ends of complementary DNA strands. Structures of this type typically form at the telomeric ends of chromosomes in order to protect against loss or damage of chromosomal DNA by sequestering the terminal nucleotides in a closed structure. In examples of closed linear DNA molecules described herein, hairpin loops flank complementary base-paired DNA strands, forming a closed linear (cl) DNA shaped structure. Closed linear DNA molecules include barbell shaped DNA.

[0882] Close ended linear duplex nucleic acid can be generated by a variety of known methods, including in vitro cell-free synthesis and in vivo methods. One method of generating the covalently closed ended linear duplex nucleic acids is by incorporation of protelomerase binding sites in a precursor molecule such that the protelomerase binding sites flank the nucleic acid of interest. Exposure of the nucleic acid molecule of interest to protelomerase thereby cleave and ligate the nucleic acid at the site. Examples of making close ended linear duplexed DNA are well known in the art e.g., as described in Nucleic Acids Res. 2015 Oct 15; 43(18): e120; Antisense & nucleic acid drug development 11:149-153 (2001); U.S. Pats. US 9109250, US 9499847, US 10501782, US 10286399; and/or, U.S. Publication No.s US 20190185924, US20190203282; the content of all of which are incorporated herein by reference in entirety.

[0883] Alternate methods of generating covalently closed end linear DNA that lack prokaryotic sequence or, bacterial sequences, are known in the art e.g., by formation of mini-circle DNA from plasmids (e.g. as described in U.S. Pat. 8,828,726, and U.S. Pat. 7,897,380, the contents of each of which are incorporated by reference in their entirety). For example, one method of cell-free synthesis combines the use of two enzymes - Phi29 DNA polymerase and a protelomerase, and generates high fidelity, covalently closed, linear DNA constructs. The constructs contain no antibiotic resistance markers, and therefore eliminate the packaging of these sequences. The process can amplify AAV genome DNA in a 2-week process at commercial scale and maintain the ITR sequences required for virus production.

[0884] In certain embodiments, the in vivo cell system is used to produce a non-viral DNA vector construct for delivery of a predetermined nucleic acid sequence into a target cell for sustained expression. The non-viral DNA vector comprises, two DD-ITRs each comprising: an inverted terminal repeat having an A, A′, B, B′, C, C′ and D region; a D′ region; and wherein the D and D′ region are complementary palindromic sequences of about 5-20 nt in length, are positioned adjacent the A and A′ region; the predetermined nucleic acid sequence (e.g. a heterologous gene for expression); wherein the two DD-ITRs flank the nucleic acid in the context of covalently closed non-viral DNA and wherein the closed linear vector comprises a ½ protelomerase binding site on each end as for example as described in International publication no. WO 2019246544, which is incorporated herein by reference in its entirety.

[0885] In alternative embodiments, generation of rAAV vectors disclosed herein, e.g.., for the methods and compositions disclosed as disclosed herein can be performed using closed ended linear duplex DNA, including but not limited to Doggybone technology (dbDNA™), as disclosed in U.S. Application 2018/0037943 and Karbowniczek et al., Bioinsights, 2017, both of which are incorporated herein in its entirety by reference. In brief, a plasmid for AAV production using a closed ended linear duplex DNA technology can comprise the ITRs, promoter and gene of interest is flanked by a 56bp palindromic protelomerase recognition sequence. In some aspects of the embodiment, the ITR is 145 bp or less. In certain aspects of the embodiment, the ITR is 130 bp. The plasmid is denatured, and in the presence of a Phi29 DNA polymerase, and appropriate primers, Phi29 initiates rolling circle amplification (RCA), creating a double stranded cancatameric repeats of the original construct. When protelomerase is added, binding of the palindromic protelomerase recognition sequences occurs and cleavage-joining reaction occurs to result in a monomeric double stranded (ds) linear covalently closed DNA construct. Addition of common restriction enzymes remove the undesired DNA plasmid backbone sequence and digestion with exonuclease activity, resulting in barbell shaped DNA which can be size fractionated to isolate the barbell shaped DNA sequence encoding the ITRs, promoter and gene of interest. An exemplary plasmid for generation of rAAV vectors using closed ended linear duplex DNA including barbell shaped DNA, comprises in the following 5′ to 3′ direction: 5′-protelomerase RS, 5′ITR, LSP promoter, hGAA, 3′UTR, hGH poly(A), 3′ ITR, 3′-protelomerase RS (sense strand), where the sense strand is linked to the complementary antisense strand for a stranded (ds) linear covalently closed DNA construct. The use of closed ended linear duplex DNA, e.g., barbell shaped DNA as a starting material for the manufacturing of an AAV vector for use in the methods and composition as disclosed herein eliminates the bacterial backbone used to propagate the plasmid containing AAV vector with an inability for the product to trigger Toll-like receptor 9 (TLR9) responses. In some embodiments, methods of making the rAAV vectors disclosed herein are disclosed in US 9109250, US 9499847, US 10501782, US 10286399; and/or, U.S. Publication No’s US 2019/0185924, US2019/0203282, each of which are incorporated herein in their entirty by reference.

[0886] In an embodiment, an rAAV vector useful in the treatment of cardiovascular diseases or heart diseases or heart failure as disclosed herein is an AAV3b capsid. AAV3b capsids encompassed for use are described in 2017/106236, and 9,012,224 and 7,892,809, which are incorporated herein in its entirety by reference.

[0887] In an embodiment, the AAV capsid proteins and virus capsids of this invention can be chimeric in that they can comprise all or a portion of a capsid subunit from another virus, optionally another parvovirus or AAV, e.g., as described in international patent publication WO 00/28004, which is incorporated by reference. In some embodiments, an rAAV vector genome is single stranded or a monomeric duplex as described in U.S. Pat. No. 8,784,799, which is incorporated herein.

[0888] As a further embodiment, the AAV capsid proteins and virus capsids of this invention can be polyploid (also referred to as haploid) in that they can comprise different combinations of VP1, VP2 and VP3 AAV serotypes in a single AAV capsid as described in PCT/US18/22725, PCT/US2018/044632, or US 10,550,405 which are incorporated by reference.

[0889] In an embodiment, an rAAV vector useful in the treatment of a cardiac disease or disorder, e.g., heart failure or CHF as disclosed herein is an AAV3b capsid. AAV3b capsids encompassed for use are described in 2017/106236, and 9,012,224 and 7,892,809, and International application PCT/US2019/061653 (WO2020/102645), which are incorporated herein in its entirety by reference. In some embodiments the AAV3b capsid is selected from any of: a AAV3b265D capsid, AAV3b265D549A capsid, AAV3bSASTG capsid, AAV3b265D549A capsid, AAV3b549A capsid, AAV3bQ263Y capsid, a AAV3bSASTG capsid comprising a AAV3b Q263A/T265 capsid as disclosed in WO2020/102645 which is incorporated herein in its entirety by reference. In some embodiments, the AAV3b capsid is selected from any of: SEQ ID NO: 44, 46, 50, 52, or 54 as disclosed in WO2020/102645 which is incorporated herein in its entirety by reference.

[0890] In order to facilitate their introduction into a cell, an rAAV vector genome useful in the invention are recombinant nucleic acid constructs that include (1) a heterologous sequence to be expressed (in one embodiment, a polynucleotide encoding an inhibitor of PP1, e.g., I-1 or I-1c, or a variant thereof as disclosed herein) and (2) viral sequence elements that facilitate integration and expression of the heterologous genes. The viral sequence elements may include those sequences of an AAV vector genome that are required in cis for replication and packaging (e.g., functional ITRs) of the DNA into an AAV capsid. In an embodiment, the heterologous gene encodes an inhibitor of PP1, e.g., I-1 or I-1c, or a variant thereof as disclosed herein, for expressing the inhibitor of PP1 in a patient suffering from a cardiac disease or disorder, e.g., heart failure or CHF as disclosed herein. In an embodiment, such an rAAV vector genome may also contain marker or reporter genes. In an embodiment, an rAAV vector genome can have one or more of the AAV3b wild-type (WT) cis genes replaced or deleted in whole or in part, but retain functional flanking ITR sequences.

[0891] In one embodiment, an rAAV vector as disclosed herein useful in the treatment of a cardiac disease or disorder, e.g., heart failure or CHF as disclosed herein comprises a rAAV genome as disclosed herein, encapsulated by an AAV3b capsid or AAV2i8 capsid. In some embodiments, an rAAV vector as disclosed herein useful in the treatment of a cardiac disease or disorder, e.g., heart failure or CHF as disclosed herein comprises a rAAV genome as disclosed herein, encapsulated by any AAV3b capsid selected from: AAV3b capsid (SEQ ID NO: 44 as disclosed in WO2020/102645); AAV3b265D capsid (SEQ ID NO: 46 as disclosed in WO2020/102645), AAV3b ST (S663V+T492V as disclosed in WO2020/102645) capsid (SEQ ID NO: 48 as disclosed in WO2020/102645), AAV3b265D549A capsid (SEQ ID NO: 50 as disclosed in WO2020/102645); AAV3b549A capsid (SEQ ID NO: 52 as disclosed in WO2020/102645); AAV3bQ263Y capsid (SEQ ID NO: 54 as disclosed in WO2020/102645), or a AAV3bSASTG (i.e., Q263A/T265 as disclosed in WO2020/102645) capsid.

[0892] AAV vectors have been extensively discussed in the art. AAV vectors are of particular interest as AAV vectors do not typically integrate into the genome and do not elicit immune response. AAV serotypes 1, 2, 4, 5, 8, 9, rh10, DJ8 and 2g9 (AAV1, AAV2, AAV4, AAV5, AAV8, AAV9, AAVrh10, AAVDJ8 and AAV2g9) have been noted to achieve efficient transduction in the heart. Therefore, AAV1, AAV2, AAV4, AAV5, AAV8, AAV9, AAVrh10, AAVVDJ8, AAV2g9, AAV2i8 and derivatives thereof are particularly preferred AAV serotypes. In some embodiments, AAV9 is a preferred AAV vector. In other embodiments, AAV2g9 is a particularly preferred AAV vector (WO2014/144229). In yet other embodiments, a particularly preferred AAV vector is AAVDJ8. In some embodiments, AAVrh10 is particularly preferred AAV vector. In yet another embodiment, AAV2i8 is particularly preferred vector. AAV2i8 is disclosed in Patent 8,889,641, which is incorporated herein in its entirety by reference. In some embodiments, the AAV is a hybrid-AAV2ITR/AAV, as disclosed in U.S. Pat. 7,172,893, which is incorporated herein in its entirety by reference. Suitably an AAV vector comprises a viral genome which comprises a nucleic acid sequence of the present invention positioned between two inverted terminal repeats (ITRs). WO2019/028306, for example discloses various wild type and modified AAV vectors that can be used in the heart. In one embodiment, AAV vectors of the present invention are recombinant AAV viral vectors which are replication defective, lacking sequences encoding functional Rep and Cap proteins within their viral genome. These defective AAV vectors may lack most or all parental coding sequences and essentially carry only one or two AAV ITR sequences and the nucleic acid of interest for delivery to a cell, a tissue, an organ or an organism. Suitably AAV vectors for use herein comprise a virus that has been reduced to the minimum components necessary for transduction of a nucleic acid payload or cargo of interest. In this manner, AAV vectors are engineered as vehicles for specific delivery while lacking the deleterious replication and/or integration features found in wild-type viruses. In one embodiment, the AAV particle of the present invention is an scAAV. In some embodiments, the AAV particle of the present invention is an ssAAV. Methods for producing and/or modifying AAV particles are disclosed extensively in the art (see e.g. WO2000/28004; WO2001/23001; WO2004/112727; WO 2005/005610 and WO 2005/072364, which are incorporated herein by reference). In one embodiment the AAV vector comprises a capsid that allows for blood brain barrier penetration following intravascular (e.g. intravenous or intraarterial) administration (see e.g. WO2014/144229, which discusses, for example, capsids engineered for efficient crossing of the blood brain barrier, e.g. capsids or peptide inserts including VOY 101, VOY201, AAVPHP.N, AAVPHP.A, AAVPHP.B, PHP.B2, PHP.B3, G2A3, G2B4, G2B5, PHP.S, and variants thereof).

[0893] Methods of making AAV vectors are well known in the art and are described in e.g., U.S. Pat. Nos. US6204059, US5756283, US6258595, US6261551, US6270996, US6281010, US6365394, US6475769, US6482634, US6485966, US6943019, US6953690, US7022519, US7238526, US7291498 and US7491508, US5064764, US6194191, US6566118, US8137948; or International Publication Nos. WO1996039530, WO1998010088, WO 1999014354, WO1999/015685, WO1999/047691, WO2000/055342, WO2000/075353 and WO2001/023597; Methods In Molecular Biology, ed. Richard, Humana Press, NJ (1995); O’Reilly et al, Baculovirus Expression Vectors, A Laboratory Manual, Oxford Univ. Press (1994); Samulski et al.,J Fir.63:3822-8 (1989); Kajigaya et al, Proc. Nat′l. Acad. Sci. USA 88: 4646-50 (1991); Ruffing et al., J. Vir. 66:6922-30 (1992); Kimbauer et al, Vir., 219:37-44 (1996); Zhao et al, Vir.272: 382-93 (2000); the contents of each of which are herein incorporated by reference. Viral replication cells commonly used for production of recombinant AAV viral particles include but are not limited to HEK293 cells, COS cells, HeLa cells, KB cells, and other mammalian cell lines.

[0894] It is to be understood that a viral expression system will further be modified to include any necessary elements required to complement a given viral vector during its production using methods described herein. For example, in certain embodiment, the nucleic acid cassette is flanked by terminal repeat sequences. In one embodiment, for the production of rAAV vectors, the AAV expression system will further comprise at least one of a recombinant AAV plasmid, a plasmid expressing Rep, a plasmid expressing Cap, and an adenovirus helper plasmid. Complementary elements for a given viral vector are well known the art and a skilled practitioner would be capable of modifying the viral expression system described herein accordingly.

[0895] A viral expression system for manufacturing an AAV vector (e.g., an AAV expression system) could further comprise Replication (Rep) genes and/or Capsid (Cap) genes in trans, for example, under the control of an inducible promoter. Expression of Rep and Cap can be under the control of one inducible promoter, such that expression of these genes are turned “on” together, or under control of two separate inducible promoters that are turned “on” by distinct inducers. On the left side of the AAV genome there are two promoters called p5 and p19, from which two overlapping messenger ribonucleic acids (mRNAs) of different length can be produced. Each of these contains an intron which can be either spliced out or not, resulting in four potential Rep genes; Rep78, Rep68, Rep52 and Rep40. Rep genes (specifically Rep 78 and Rep 68) bind the hairpin formed by the ITR in the self-priming act and cleave at the designated terminal resolution site, within the hairpin. They are necessary for the AAVS1-specific integration of the AAV genome. All four Rep proteins were shown to bind ATP and to possess helicase activity. The right side of a positive-sensed AAV genome encodes overlapping sequences of three capsid proteins, VP1, VP2 and VP3, which start from one promoter, designated p40. The cap gene produces an additional, non-structural protein called the Assembly-Activating Protein (AAP). This protein is produced from ORF2 and is essential for the capsid-assembly process. Necessary elements for manufacturing AAV vectors are known in the art, and can further be reviewed, e.g., in U.S. Pat. Nos. US5478745A; US5622856A; US5658776A; US6440742B1; US6632670B1; US6156303A; US8007780B2; US6521225B1; US7629322B2; US6943019B2; US5872005A; and U.S. Pat. Application Nos. US 2017/0130245; US20050266567A1; US20050287122A1; the contents of each are incorporated herein by reference in their entireties.

[0896] In one embodiment, the cells for producing an AAV vector are cultured in suspension. In some embodiments, the cells are cultured in animal component-free conditions. The animal component-free medium can be any animal component-free medium (e.g., serum-free medium) compatible with a given cell line, for example, HEK293 cells. Any cell line known in the art to be capable of propagating an AAV vector can be used for AAV production using methods described herein. Exemplary cell lines that can be used to generate an AAV vector include, without limitation, HEK293, CHO, Cos-7, and NSO.

[0897] In one embodiment, a cell line for producing an AAV vector stably expresses any of the components required for AAV vector production, e.g., Rep, Cap, VP1, etc. In one embodiment, a cell line for producing an AAV vector transiently expresses any of the components required for AAV vector production, e.g., Rep, Cap, VP1, etc.

[0898] In the event that a cell line for producing an AAV vectors does not stably or transiently express rep or cap, these sequences are to be provided to the AAV expression system. AAV rep and cap sequences may be provided by any method known in the art. Current protocols typically express the AAV rep/cap genes on a single plasmid. The AAV replication and packaging sequences need not be provided together, although it may be convenient to do so. The AAV rep and/or cap sequences may be provided by any viral or non-viral vector. For example, the rep/cap sequences may be provided by a hybrid adenovirus or herpesvirus vector (e.g., inserted into the Ela or E3 regions of a deleted adenovirus vector). EBV vectors may also be employed to express the AAV cap and rep genes. One advantage of this method is that EBV vectors are episomal, yet will maintain a high copy number throughout successive cell divisions (i.e., arc stably integrated into the cell as extra-chromosomal elements, designated as an “EBV based nuclear episome,” see Margolski, Curr. Top. Microbial. Immun. 158:67 (1992)).

[0899] Typically, the AAV rep/ cap sequences will not be flanked by the TRs, to prevent rescue and/or packaging maintain of these sequences.

[0900] A viral expression system for manufacturing a lentivirus using methods described herein would further comprise long terminal repeats (LTRs) flanking the nucleic acid cassette. LTRs are identical sequences of DNA that repeat hundreds or thousands of times at either end of retrotransposons or proviral DNA formed by reverse transcription of retroviral RNA. The LTRs mediate integration of the retroviral DNA via an LTR specific integrase the host chromosome. LTRs and methods for manufacturing lentiviral vectors are further described, e.g., in U.S. Pat. Nos. US7083981B2; US6207455B1; US6555107B2; US8349606B2; US7262049B2; and U.S. Pat. Application No. US20070025970A1; US20170067079A1; US20110028694A1; the contents of each are incorporated herein by reference in their entireties.

[0901] A viral expression system for manufacturing an adenovirus using methods described herein would further comprise identical Inverted Terminal Repeats (ITR) of approximately 90-140 base pairs (exact length depending on the serotype) flanking the nucleic acid cassette. The viral origins of replication are within the ITRs exactly at the genome ends. The adenovirus genome is a linear double-stranded DNA molecule of approximately 36000 base pairs. Often, adenoviral vectors used in gene therapy have a deletion in the E1 region, where novel genetic information can be introduced; the E1 deletion renders the recombinant virus replication defective. ITRs and methods for manufacturing adenovirus vectors are further described, e.g., in U.S. Pat. Nos. US7510875B2; US7820440B2; US7749493B2; US7820440B2; US10041049B2; International Patent Application Numbers WO2000070071A1; and U.S. Pat. Application Nos. WO2000070071A1; US20030022356A1; US20080050770A1 the contents of each are incorporated herein by reference in their entireties.

[0902] In one embodiment, the viral expression system can be a host cell, such as a virus, a mammalian cell or an insect cell. Exemplary insect cells include but are not limited to Sf9, Sf21, Hi-5, and S2 insect cell lines. For example, a viral expression system for manufacturing an AAV vector could further comprise a baculovirus expression system, for example, if the viral expression system is an insect cell. The baculovirus expression system is designed for efficient large-scale viral production and expression of recombinant proteins from baculovirus-infected insect cells. Baculovirus expression systems are further described in, e.g., U.S. Pat. Nos. US6919085B2; US6225060B1; US5194376A; the contents of each are incorporated herein by reference in their entireties.

[0903] In some embodiments, the viral expression system is a cell-free system. Cell-free systems for viral vector production are further described in, for example, Cerqueira A., et al. Journal of Virology, 2016; Sheng J., et al. The Royal Society of Chemistry, 2017; and Svitkin Y.V., and Sonenberg N. Journal of Virology, 2003; the contents of which are incorporated herein by reference in their entireties.

[0904] Viral vectors produced in a cell can be released (i.e. set free from the cell that produced the vector) using any standard technique. For example, viral vectors can be released via mechanical methods, for example microfluidization, centrifugation, or sonication, or chemical methods, for example lysis buffers and detergents. Released viral vectors are then recovered (i.e., collected) and purified to obtain a pure population using standard methods in the art. For example, viral vectors can be recovered from a buffer they were released into via purification methods, including a clarification step using depth filtration or Tangential Flow Filtration (TFF). As described herein in the examples, viral vectors can be released from the cell via sonication and recovered via purification of clarified lysate using column chromatography.

[0905] Provided herein is a viral vector expressing a nucleic acid having a sequence selected from SEQ ID NOs 385-412. In one embodiment, the nucleic acid sequence has a sequence that is at least 75%, 80%, 85%, 86%, 87%, 88%, 89%, 90%, 91%, 92%, 93%, 94%, 95%, 96%, 97%, 98%, 99% identical to the sequence of SEQ ID NOs 385-412. In one embodiment, the viral vector is an AAV.

[0906] One aspect herein is an rAAV expressing a nucleic acid having a sequence selected from SEQ ID NOs 385-412. One aspect herein is an rAAV comprising a nucleic acid having a sequence selected from SEQ ID NOs 413-440.

[0907] Further provided herein is a composition comprising a viral vector, e.g., an rAAV, expressing a nucleic acid having a sequence selected from SEQ ID NOs 385-412. Further provided herein is a nucleic acid sequence encoding a I1c transgene, wherein the nucleic acid sequence is selected from SEQ ID NOs 385-412. In one embodiment, the nucleic acid sequence has a sequence that is at least 75%, 80%, 85%, 86%, 87%, 88%, 89%, 90%, 91%, 92%, 93%, 94%, 95%, 96%, 97%, 98%, 99% or more identical to a sequence selected from SEQ ID NOs 385-412.

[0908] In one embodiment, the nucleic acid sequence is a codon-optimized sequence. In one embodiment, the nucleic acid sequence as set forth in SEQ ID No.s 385-412, or encoding other optimized I-1c transgene is operatively linked with a promoter selected from a CMV promoter, a cardiac-specific promoter selected from Table 2A or a variant thereof, or a muscle-specific promoter active in cardiac and skeletal muscle selected from Table 5A or a variant thereof, or a shortened muscle-specific promoter active in cardiac and skeletal muscle selected from Table 13A, or a variant thereof.

[0909] Also provided are closed linear DNA constructs comprising a nucleic acid sequence of any of 357-384. The closed linear DNA can be used in methods for making rAAV that lack bacterial DNA sequences. Thus, also provided herein are pharmaceutical compositions for treatment of heart failure that comprise rAAV encoding constitutively active I-1c, wherein the rAAV compositions lack bacterial nucleic acid sequences.

### V. Cardiac Cells and Muscle Cells

[0910] As a non-limiting example, the suitable cardiac cells include, but are not limited to, embryonic stem cells; cardiac fibroblasts; skeletal myoblasts; cardiomyocytes, including ventricular cardiomyocytes, and the like. In other embodiments, the cardiac cell is a non-cardiomyocyte somatic cell. In some embodiments, the cardiac cell is an iPS- or other stem-cell derived cardiac cell, that is transfected with the rAAV vector disclosed herein ex vivo and transplanted into a subject. In some embodiments, the iPSC or other stem-cell derived cardiac cell is a human cell. In some embodiments, the cardiac cell is derived from an adult stem cell. Methods to differentiate iPSC into mature cardiac cells, including cardiomyocytes are known in the art, and include, without limitation, Uosaki et al. (PLOS One, 2011, 6(8): e23657) describes methods for in vitro differentiation of human iPS cells to cardiomyocytes.

[0911] In some embodiments, cardiomyocytes as disclosed herein can be derived from Isl1+ multipotent progenitor cells such as those disclosed in U.S. Provisional Application 60/856,490 and 60/860,354 and in International Application PCT/US07/23155, which is incorporated herein in its entirety by reference.

[0912] Cardiomyocytes for transfection with the rAAV vectors as disclosed herein can be identified and isolated by using agents reactive to markers typical of the cardiomyocytes lineage, including but without limitation, the positive expression of Mef2c, Nxk2.5, Tbx20, Isl1, GATA4, GATA6; Tropinin T (TnT), Troponin C (TnI), BMP7, BMP4, BMP2, miR-208, miR-143, miR-133a, miR-133b, miR-1, miR-143, miR-689 and smooth muscle actin (smActin), or homologues or variants thereof. Alternatively, cardiomyocytes are positive for the expression of Mef2c and Nxk2.5. To be more precise, cardiomyocytes can be selected or identified based on the positive expression of Mef2c and Nxk2.5 and the lack of or low level expression of at least one of the following markers: Tbx5; Snai2; miR-200a; miR-200b; miR-199a; miR-199b; miR-126-3p; miR-322 and CD31 or homologues or variants thereof.

[0913] In some embodiments, the cell marker, SIRPA (signal-regulatory protein alpha), can be used to identify a population of cardiomyocytes differentiated from stem cells and permits, for example, the isolation of a population that is 98% cardiac troponin T positive (Dubois et al., Nat. Biotech, (2011) 29;1011-1018). In the methods described by Dubois et al., negative selection of stem cells for PECAM, THY 1, PDGFRB and ITGA1 can be used to remove the non-myocyte population.

[0914] In some embodiments of the invention, the cell is ex vivo, e.g. in cell culture. In other embodiments of the invention the cell may be part of a tissue or multicellular organism.

[0915] In a preferred embodiment, the cell is a muscle cell (myocyte), which may be ex vivo or in vivo. In a preferred embodiment, the cell is a cardiac muscle cell, which may be ex vivo or in vivo. In an alternative preferred embodiment, the cell is a skeletal muscle cell, which may be ex vivo or in vivo. The muscle cell may be a primary muscle cell or a cell of a muscle-derived cell line, e.g. an immortalised cell line. The cell may be present within a muscle tissue environment (e.g. within a muscle of an animal) or may be isolated from muscle tissue, e.g. it may be in cell culture. Suitably the cell is a human cell.

[0916] The skeletal muscle cells may be from fast twitch or slow twitch muscles.

[0917] The cardiac muscle cells may be selected from ventricular cardiomyocytes, atrial cardiomyocytes, cardiac fibroblasts, or endothelial cells (EC) in the heart, as well as peri-vascular cells and pacemaker cells. In one embodiment, the muscle cell/s are cardiac muscle cell/s. In one embodiment, the muscle cell/s are skeletal muscle cell/s.

### VI. Pharmaceutical Compositions

[0918] The rAAV vectors as disclosed herein for use in the methods of administration as disclosed herein can be formulated in a pharmaceutical composition with a pharmaceutically acceptable excipient, i.e., one or more pharmaceutically acceptable carrier substances and/or additives, e.g., buffers, carriers, excipients, stabilisers, etc. The pharmaceutical composition may be provided in the form of a kit. Pharmaceutical compositions comprising the rAAV vectors as disclosed herein for use in the methods of administration as disclosed herein and uses thereof are known in the art.

[0919] Accordingly, a further aspect of the invention provides a pharmaceutical composition comprising a rAAV vector as disclosed herein for use in the methods of administration as disclosed herein. Relative amounts of the active ingredient (e.g. a rAAV vectors aa disclosed herein), a pharmaceutically acceptable excipient, and/or any additional ingredients in a pharmaceutical composition in accordance with the present disclosure may vary, depending upon the identity, size, and/or condition of the subject being treated and further depending upon the route by which the composition is to be administered. For example, the composition may comprise between 0.1 percent and 99 percent (w/w) of the active ingredient. By way of example, the composition may comprise between 0.1 percent and 100 percent, e.g., between 5 and 50 percent, between 1-30 percent, between 5- 80 percent, at least 80 percent (w/w) active ingredient.

[0920] The pharmaceutical compositions can be formulated using one or more excipients or diluents to (1) increase stability; (2) increase cell transfection or transduction; (3) permit the sustained or delayed release of the payload; (4) alter the biodistribution (e.g., target the viral particle to specific tissues or cell types); (5) increase the translation of encoded protein; (6) alter the release profile of encoded protein and/or (7) allow for regulatable expression of the payload of the invention. In some embodiments, a pharmaceutically acceptable excipient may be at least 95 percent, at least 96 percent, at least 97 percent, at least 98 percent, at least 99 percent, or 100 percent pure. In some embodiments, an excipient is approved for use for humans and for veterinary use. In some embodiments, an excipient may be approved by United States Food and Drug Administration. In some embodiments, an excipient may be of pharmaceutical grade. In some embodiments, an excipient may meet the standards of the United States Pharmacopoeia (USP), the European Pharmacopoeia (EP), the British Pharmacopoeia, and/or the International Pharmacopoeia. Excipients, as used herein, include, but are not limited to, any and all solvents, dispersion media, diluents, or other liquid vehicles, dispersion or suspension aids, surface active agents, isotonic agents, thickening or emulsifying agents, preservatives, and the like, as suited to the particular dosage form desired. Various excipients for formulating pharmaceutical compositions and techniques for preparing the composition are known in the art (see Remington: The Science and Practice of Pharmacy, 21 st Edition, A. R. Gennaro, Lippincott, Williams and Wilkins, Baltimore, MD, 2006; incorporated herein by reference in its entirety). The use of a conventional excipient medium may be contemplated within the scope of the present disclosure, except insofar as any conventional excipient medium may be incompatible with a substance or its derivatives, such as by producing any undesirable biological effect or otherwise interacting in a deleterious manner with any other component(s) of the pharmaceutical composition.

[0921] The rAAV vectors as disclosed herein for use in the methods of administration as disclosed herein may be used in combination with one or more other therapeutic, prophylactic, research or diagnostic agents. By “in combination with,” it is not intended to imply that the agents must be administered at the same time and/or formulated for delivery together, although these methods of delivery are within the scope of the present invention. Compositions can be administered concurrently with, prior to, or subsequent to, one or more other desired therapeutics or medical procedures. In some embodiments, the delivery of one treatment (e.g., gene therapy vectors) is still occurring when the delivery of the second (e.g., one or more therapeutic) begins, so that there is overlap in terms of administration. This is sometimes referred to herein as “simultaneous” or “concurrent delivery.” In other embodiments, the delivery of one treatment ends before the delivery of the other treatment begins. In some embodiments of either case, the treatment is more effective because of combined administration. For example, the second treatment is more effective, e.g., an equivalent effect is seen with less of the second treatment, or the second treatment reduces symptoms to a greater extent, than would be seen if the second treatment were administered in the absence of the first treatment, or the analogous situation is seen with the first treatment. In some embodiments, delivery is such that the reduction in a symptom, or other parameter related to the disorder is greater than what would be observed with one treatment delivered in the absence of the other. The effect of the two treatments can be partially additive, wholly additive, or greater than additive. The delivery can be such that an effect of the first treatment delivered is still detectable when the second is delivered. The composition described herein and the at least one additional therapy can be administered simultaneously, in the same or in separate compositions, or sequentially. For sequential administration, the gene therapy vectors described herein can be administered first, and the one or more therapeutic can be administered second, or the order of administration can be reversed. The gene therapy vectors and the one or more therapeutic can be administered during periods of active disorder, or during a period of remission or less active disease. The gene therapy vectors can be administered before another treatment, concurrently with the treatment, posttreatment, or during remission of the disorder.

[0922] When administered in combination, the rAAV vectors as disclosed herein for use in the methods of administration as disclosed herein and the one or more therapeutic (e.g., second or third therapeutic), or all, can be administered in an amount or dose that is higher, lower or the same as the amount or dosage of each used individually, e.g., as a monotherapy. In certain embodiments, the administered amount or dosage of a rAAV vector as disclosed herein for use in the methods of administration as disclosed herein and the one or more therapeutic (e.g., second or third agent), or all, is lower (e.g., at least 20%, at least 30%, at least 40%, or at least 50%) than the amount or dosage of each used individually. In other embodiments, the amount or dosage of the rAAV vector as disclosed herein for use in the methods of administration as disclosed herein and the one or more therapeutic (e.g., second or third agent), or all, that results in a desired effect (e.g., treatment of a cardiovascular disease or heart disease) is lower (e.g., at least 20%, at least 30%, at least 40%, or at least 50% lower) than the amount or dosage of each individually required to achieve the same therapeutic effect.

[0923] In some embodiments, the methods of administration of a rAAV vector as disclosed herein can deliver a rAVV vector disclosed herein alone, or in combination with an additional agent, for example, an immune modulator as disclosed herein. In some embodiments, the additional agent is a muscle enhancing protein or peptide, e.g., to improve blood flow and enhance muscle function in the treated muscle. Furthermore, if desired, in some embodiments, the additional agent a vasoactive agent which can be employed in conjunction with these methods and compositions, as described herein, in order to further enhance gene delivery at the target site. Exemplary vasoactive agent include but are not limited to histamine, a histamine agonist, a nitric oxide donor, or a VEGF protein, and can be used to increase the efficiency of gene transfer at a gene vector dose. In some embodiments, a vasoactive agent is useful the to limit the amount of vector required to be administered in order to achieve a given therapeutic effect.

[0924] Compounds which may be used in combination with the AAV particles described herein include, but are not limited to, agents currently used for treatment of congestive heart failure include angiotensin converting enzyme (ACE) inhibitors, beta-blockers, compounds that induce inotropic effects (e.g., increase of force of contraction of the heart) and compounds that increase urine flow, or diuretics. In some embodiments, the rAAV vector is administered according to the methods as disclosed herein, in combination with another active agent, such as a food-intake-reducing, or plasma glucose-lowering or plasma lipid-lowering agent, such as amylin, an amylin agonist, a CCK, or a leptin, or a cardiac treatment agent such as angiotensin converting enzyme (ACE) inhibitors. In one embodiment, a rAAV vector as disclosed herein, administered according to the methods as disclosed herein is administered in combination with captopril (CAPOTEN®). In other embodiments, a rAAV vector as disclosed herein, administered according to the methods as disclosed herein is administered in combination with one or more additional ACE inhibitors, such as benazepril (LOTENSIN®), enalapril (VASOTEC®), lisinopril (PRMIVIL® ZESTRIL®), fosinopril (MONOPRIL®), ramipril (ALTACE®), perindopril (ACEON®), quinapril (ACCUPRIL®), moexipril (UNIVASC®), and trandolapril (MAVIK®).

[0925] In some embodiments, a rAAV vector as disclosed herein, administered according to the methods as disclosed herein may be used for treatment of congestive heart failure in combination with one or more beta blockers, such as sotalol (BETAPACE®), timolol (BLOCADREN®), esmolol (BREVIBLOC®), carteolol (CARTROL®), carvedilol (COREG®), nadolol (CORGARD®), propranolol (INDERAL®), propranolol (MDERAL-LA®), betaxolol (KERLONE®), penbutolol (LEVATOL®), metoprolol (LOPRESSOR®), labetalol (NORMODYNE®), acebutolol (SECTRAL®), atenolol (TENORMIN®), metoprolol (TOPROL-XL®), labetalol (TRAND ATE®), pindolol (VISKEN®), and bisoprolol ( ZEBET A®).

[0926] In some embodiments, a rAAV vector as disclosed herein, administered according to the methods as disclosed herein may be used for treatment of congestive heart failure in combination with one or more angiotensin π receptor blockers (ARB), such as candesartan cilexetil (ATACAND®), irbesartan (AVAPRO®), losartan (COZAAR®), valsartan (DIO V AN®), telmisartan (MICARDIS®), and eprosartan mesylate (TEVETEN®). In some embodiments, a rAAV vector as disclosed herein, administered according to the methods as disclosed herein may be used for treatment of congestive heart failure in combination with one or more aldosterone antagonists, such as spironolactone (ALDACTAZIDE®) and eplerenone (INSPRA®). In some embodiments, a rAAV vector as disclosed herein, administered according to the methods as disclosed herein may be used in combination with an IL-18 inhibitor, e.g., or IL-18BP or a variant thereof, as disclosed in U.S. Pat. 7,799,541, which us incorporated herein in its entirety by reference.

[0927] In some embodiments, a rAAV vector as disclosed herein, administered according to the methods as disclosed herein may be used for treatment of congestive heart failure in combination with one or more vasopeptidase inhibitors. Vasopeptidase inhibitors include NEP/ACE inhibitors that possess natural endopeptidase (NEP) and ACE inhibitory activity. Examples of NEP/ACE inhibitors include, but are not limited to, tricyclic benzazepinone thiols, omapatrilat, gemopatrilat, mixanpril, racecadotril, fasidotril, sampatrilat, MDL 100.240 Z13752A, BMS1 89921, BMS1 82657, and CGS 30008. Examples of NEP/ACE inhibitors suitable for use herein include those disclosed in U.S. Pat. Nos. 5,362,727, 5,366,973, 5,225,401, 4,722,810, 5,223,516, 4,749,688, and 5,552,397, which are incorporated herein in their entirety by reference. Administration of such additional agents or compounds can be at the same time (i.e., during administration) of the rAAV vector administered according to the methods as disclosed herein, or the subject can be undergoing treatment with the additional agent before, or during, or after administration with the rAAV vector.

[0928] In some embodiments, a rAAV vector as disclosed herein, administered according to the methods as disclosed herein may be used for treatment of congestive heart failure in combination with any therapy for congestive heart failure that is known in the art. For example, in one embodiment, administration of a rAAV vector according to the methods as disclosed herein can be used for treatment of congestive heart failure in combination with therapeutic devices such as cardiac resynchronization

[0929] A pharmaceutical composition in accordance with the present disclosure may be prepared, packaged, and/or sold in bulk, as a single unit dose, and/or as a plurality of single unit doses. As used herein, a “unit dose” refers to a discrete amount of the pharmaceutical composition comprising a predetermined amount of the active ingredient. The amount of the active ingredient is generally equal to the dosage of the active ingredient which would be administered to a subject and/or a convenient fraction of such a dosage such as, for example, one-half or one-third of such a dosage.

[0930] In a further aspect, a rAAV vector as disclosed herein is prepared for use as medicament for use in the methods of administration as disclosed herein.

[0931] In a further aspect, a rAAV vector as disclosed herein is prepared for use as medicament for use in the methods of administration as disclosed herein for use in therapy, i.e. the prevention or treatment of a medical condition or disease, e.g., a cardiovascular disease or heart disease or disorder as disclosed herein. Exemplary medical conditions or diseases relevant to the present aspect are discussed below.

[0932] In a further aspect, there is provided a cell comprising a rAAV vector as disclosed herein comprising a synthetic cardiac-specific promoter selected from Tables 1-3, or a variant thereof. In some embodiments the cell is a mammalian cell, optionally a human cell. Suitably, the cell is a cardiac cell. Suitably the cell may be a cardiomyocyte, e.g., ventricular cardiomyocyte. Suitably the cell may be a human cardiomyocyte, e.g., human ventricular cardiomyocyte.

[0933] In some embodiments, the pharmaceutical composition comprises recombinant AAV vector in a buffer (e.g., excipient) of about pH 7.0 to about pH 8.0. In some embodiments, the pH of the buffer is from about 7.0 to about 7.5. In preferred embodiment, the pH of the buffer is less than 7.5. In several embodiments, the buffer is phosphate buffer saline (PBS) or a phosphate buffer (e.g., 10 mM Phosphate pH 7.4, 350 mM NaCl, 2.7 mM KCl, 5% Sorbitol, 0.001% (w/v) poloxamer 188). In certain embodiments, the buffer or, excipient comprises ions selected from the group consisting of sodium, potassium, phosphate, chloride, calcium, magnesium, sulfate, citrate and any combination thereof. The pharmaceutical composition further comprises polyol, sugar or, similar. In some embodiment, the pharmaceutical composition comprises glycerol or, propylene glycol, or, polyethylene glycol, or, sorbitol, or, mannitol. In several embodiments, the sorbitol concentration ranges from about 1% (w/v) to about 10% (w/v). In some embodiments, the sorbitol concentration ranges from about 2%(w/v) to about 8%(w/v). In preferred embodiments, the sorbitol concentration ranges from about 3%(w/v) to about 6% (w/v). In certain embodiments, the sorbitol concentration is 1% (w/v), 2% (w/v), 3% (w/v), 4% (w/v), 5% (w/v), 6% (w/v), 7% (w/v), 8% (w/v), 9% (w/v), or, 10% (w/v). The pharmaceutical composition further comprises a non-ionic surfactant. In some embodiments, the non-ionic surfactant is selected from the group consisting of polyoxyethylene-polyoxypropylene block copolymers, alkylglucosides, alkyl phenol ethoxylates, polysorbates, polyoxyethylene alkyl phenyl ethers, and any combinations thereof. In some embodiments, the non-ionic surfactant is poloxamer 188 or, Ecosurf SA-15. In ceratin embodiments, poloxamer 188 or, Ecosurf SA-15 concentration is 0.0005% (w/v), 0.0008% (w/v), 0.0009% (w/v), 0.001% (w/v), 0.002% (w/v), 0.0025% (w/v), 0.003% (w/v), 0.0035% (w/v), 0.004% (w/v), 0.0045% (w/v), 0.005% (w/v), 0.006% (w/v), 0.007% (w/v), 0.008% (w/v), 0.009% (w/v), or, 0.01% (w/v).

[0934] The pharmaceutical composition comprises at least 1×10⁹ vg/ml recombinant AAV vector as disclosed in the present invention. In some embodiments the pharmaceutical composition comprises about 1×10⁹ vg/ml to about 1×10¹³ vg/ml recombinant AAV vector. In some embodiments, the pharmaceutical composition comprises about 1×10¹¹ vg/ml to about 1×10¹³ vg/ml recombinant AAV vector. In several embodiments, the pharmaceutical composition comprises about 1×10¹¹ vg/ml to about 1×10¹³ vg/ml recombinant AAV2i8 vector comprising nucleic acid encoding phosphatase inhibitor polypeptide wherein the nucleic acid is operatively linked with a promoter selected from a CMV promoter, a cardiac-specific promoter selected from Table 2A or a variant thereof, or a muscle-specific promoter active in cardiac and skeletal muscle selected from Table 5A or a variant thereof, or a shortened muscle-specific promoter active in cardiac and skeletal muscle selected from Table 13A, or a variant thereof.

### VII. Other Methods and Uses

[0935] In one embodiment, the technology also provides a rAAV vector as disclosed herein for use in the methods of administration as disclosed herein for use in the treatment of a cardiovascular disease or heart disease or heart failure, preferably CHF. Relevant conditions, diseases and therapeutic expression products are discussed above. In one embodiment, the technology also provides a rAAV vector as disclosed herein for use in the treatment of a cardiovascular disease or heart disease or heart failure, preferably CHF.

[0936] In one embodiment, the technology also provides a rAAV vector as disclosed herein for use in the methods of administration as disclosed herein for use as a medicament. In one embodiment, the technology also provides a rAAV vector as disclosed herein for use as medicament.

[0937] In one embodiment, the technology also provides a rAAV vector as disclosed herein for use in the methods of administration as disclosed herein for use the manufacture of a pharmaceutical composition for treatment of any condition or disease mentioned herein. In one embodiment, the technology also provides a rAAV vector as disclosed herein for use in the treatment of any condition or disease mentioned herein.

[0938] In one embodiment, the technology also provides a cell comprising rAAV vector as disclosed herein for use in the methods of administration as disclosed herein. Suitably the cell is a eukaryotic cell. The eukaryotic cell can suitably be an animal (metazoan) cell (e.g. a mammalian cell). Suitably, the cell is a human cell. In some embodiments of the invention, the cell is ex vivo, e.g. in cell culture. In other embodiments of the invention the cell may be part of a heart tissue or a heart tissue. In one embodiment, the technology also provides a cell comprising rAAV vector as disclosed herein for use as a medicament.

[0939] In a preferred embodiment, the cell is a heart cell, which may be ex vivo or in vivo. The heart cell may be a cardiomyocyte, e.g., ventricular cardiomyocyte, atrial cardiomyocyte, smooth muscle cell, pacemaker cell, or other heart cell. Alternatively, the heart cell may be a heart-derived cell line, e.g. immortalised cell line. In one embodiment, the cell is a muscle cell, e.g., a cardiomyocyte or smooth muscle cell in the heart. The cell may be present within a heart tissue environment (e.g. within the heart of an animal) or may be isolated from heart tissue, e.g. it may be in cell culture. Suitably the primary cell or the cell line is a human cell.

[0940] In a further aspect the present invention provides a method for producing a rAAV vector as disclosed herein in a cell, preferably a cardiac cell. The method suitably comprises maintaining said cardiac cell under suitable conditions for expression of the gene. In culture this may comprise incubating the cardiac cell, or tissue comprising the cardiac cell, under suitable culture conditions. The expression may of course be in vivo, e.g. in one or more cells in the heart of a subject.

[0941] Suitably the method comprises the step of introducing the rAAV vector as disclosed herein into the cardiac cell. A wide range of methods of transfecting cardiac cells are well-known in the art. A preferred method of transfecting cardiac cells is transducing the cells with a rAAV vector as disclosed herein.

[0942] It will be evident to the skilled person that rAAV vector as disclosed herein can be used in the methods of administration as disclosed herein for gene therapy.

[0943] The present invention also provides a method of administrating a rAAV vector as disclosed herein for expressing a therapeutic transgene in a cardiac cell, the method comprising introducing into the cardiac cell a rAAV vector as disclosed herein according to the methods of administration as disclosed herein. The cardiac cell can be in vivo or ex vivo.

[0944] All aspects of the compositions and methods of the technology disclosed herein can be defined in any one or more of the following numbered paragraphs:

[0945] A. A method of treating a patient having a heart failure, comprising: administering into heart cells of the patient, at least one total dose of a rAAV vector comprising a nucleic acid sequence encoding a phosphatase inhibitor protein that inhibits phosphatase activity,wherein, at least one dose of the rAAV is selected from a total dose-range of about 10¹³ vg to about 10¹⁵ vg, and wherein, six months post-administration NT-proBNP level in serum of the patient is below 900 pg/ml.

[0946] B. The method of paragraph A, wherein the rAAV vector further comprises CMV promoter or a synthetic promoter, operatively linked to the phosphatase inhibitor protein.

[0947] C. The method of any of paragraphs A-B, wherein the total dose is administered over a period of time of about 20 minutes to about 30 minutes.

[0948] D. The method of any of paragraphs A-C, wherein the administration of the total dose is performed in sub-doses, wherein each sub-dose is administered over a period of time of 1-5 minutes.

[0949] E. The method of any of paragraphs A-D, wherein the administration of the total dose is performed in five sub-doses, each sub-dose is administered over a period of time of 1-5 minutes.

[0950] F. The method of paragraph 5, wherein the five sub-doses are administered over a period of about 20 minutes to about 30 minutes.

[0951] G. The method of any of paragraphs A-E, wherein the rAAV is selected from the group consisting of AAV2, AAV6, AAV8, AAV9, AAV2i8, rh10, AAV2.5 and AAV2G9.

[0952] H. The method of any of paragraph 1-7, wherein at least one total dose of the rAAV is 10¹³ vg, 3×10¹³ vg, 10¹⁴ vg, 3×10¹⁴ vg, or, 10¹⁵ vg.

[0953] I. A method of treating a patient having a heart failure, comprising: administering into heart cells of the patient, at least one total dose of a rAAV vector comprising (i) a nucleic acid sequence encoding a phosphatase inhibitor protein that inhibits phosphatase activity, (ii) a synthetic promoter, operatively linked to the phosphatase inhibitor (I-1) protein.

[0954] J. The method of paragraph I, wherein the total dose is administered over a period of time of about 20 minutes to about 30 minutes.

[0955] K. The method of paragraph I-J, wherein the administration of the total dose is performed in sub-doses, wherein each sub-dose is administered over a period of time of 1-5 minutes.

[0956] L. The method of paragraph I to K, wherein the administration of the total dose is performed in five sub-doses, each sub-dose is administered over a period of time of 1-5 minutes

[0957] M. The method of paragraph I to L, wherein the five sub-doses are administered over a period of about 20 minutes to about 30 minutes.

[0958] N. The method of any of paragraphs A-M, wherein the rAAV is selected from the group consisting of AAV2, AAV6, AAV8, AAV9, AAV2i8, rh10, AAV2.5 and AAV2G9.

[0959] O.. The method of any of paragraph A-N, wherein at least one total dose of the rAAV is selected from a dose-range of about 10¹³ vg to about 10¹⁵ vg.

[0960] P. The method of any of paragraphs A-O, wherein at least one dose of the rAAV is 10¹³ vg, 3×10¹³ vg, 10¹⁴ vg, 3×10¹⁴ vg, or, 10¹⁵ vg.

[0961] Q. The method of any of paragraphs A-P, wherein six-months post administration of the rAAV dose, NT-proBNP level in serum of the patient is below 900 pg/ml.

[0962] R. The method of any of paragraphs A-Q, wherein the method further comprises administering an immune modulator.

[0963] S. The method of any of the preceding paragraphs A to R, wherein the rAAV vector comprises a nucleic acid sequence encoding a polypeptide comprising amino acids 1-65 of SEQ ID NO: 2, wherein threonine at position 35 of SEQ ID NO: 1 is replaced with aspartic acid (T35D).

[0964] T. The method of any of the preceding paragraphs A to S, wherein the rAAV is selected from Table 11.

[0965] U. The method of any of the preceding paragraphs A to T, the administration further comprises nitroprusside or nitroglycerin.

[0966] V. The method of any of paragraphs A-U, wherein the synthetic promoter causes expression of the phosphatase inhibitor protein preferentially in smooth muscle cells.

[0967] W. The method of any of paragraphs A-V, wherein the synthetic promoter causes expression of the phosphatase inhibitor protein preferentially in cardiac cells.

[0968] X. The method of any of paragraphs A-W, wherein the expression is equivalent to the expression caused by CMV promoter.

[0969] Y. The method of any of paragraphs A-X, wherein the administration is into the lumen of the coronary artery of the heart of the patient or systemic administration.

[0970] Z. The method of any of paragraphs A-Y, wherein the synthetic promoter is a cardiac-specific promoter selected from Table 2A or a variant thereof, or a muscle-specific promoter active in cardiac and skeletal muscle selected from Table 5A, or, Table 13A or a variant thereof.

[0971] AA. A method of treating a patient having a cardiovascular condition or a heart disease, comprising: administering into heart cells of the patient, at least one total dose of a rAAV vector comprising a therapeutic nucleic acid operatively linked to a cardiac-specific promoter selected from Table 2A or a variant thereof, or a muscle-specific promoter active in cardiac and skeletal muscle selected from Table 5A, or, Table 13A, or a variant thereof, wherein the therapeutic nucleic acid is RNA or DNA, wherein the therapeutic nucleic acid expresses a therapeutic protein selected from Table 18A or 18B.

[0972] BB. The methods of paragraph AA, wherein the cardiovascular disease or heart disease is selected from any of: congestive heart failure (CHF), left ventricular remodeling, peripheral arterial occlusive disease (PAOD), dilated cardiomyopathy (DCM) including idiopathic dilated cardiomyopathy (IDCM), coronary artery disease, ischemia, arrhythmia, myocardial infarction (MI), abnormal heart contractility, acute (decompensated) heart failure (AHF), abnormal Ca2+ metabolism, myocardial ischemia, atherosclerosis, cardiomyopathy, idiopathic cardiomyopathy, cardiac arrhythmias, muscular dystrophy, muscle mass abnormality, muscle degeneration, infective myocarditis, drug- or toxin-induced muscle abnormalities, hypersensitivity myocarditis, an autoimmune endocarditis and congenital heart disease and pulmonary heart hypertension.

[0973] CC. The method of any paragraphs of AA-BB, wherein the total dose is administered over a period of time of about 20 minutes to about 30 minutes.

[0974] DD. The method of any of paragraphs AA-CC, wherein the administration of the total dose is performed in sub-doses, wherein each sub-dose is administered over a period of time of 1-5 minutes.

[0975] EE. A method of treating a patient having a heart failure, comprising: administering into heart cells of the patient, at least one total dose of a rAAV vector comprising a nucleic acid sequence encoding a phosphatase inhibitor protein that inhibits phosphatase activity, wherein, at least one total dose of the rAAV is selected from a dose-range of about 10¹³ vg to about 10¹⁵ vg, wherein, the total dose is administered over a period of time of about 20 minutes to about 30 minutes, wherein, the administration of the total dose is performed in sub-doses, wherein each sub-dose is administered over a period of time of 1-5 minutes.

[0976] FF. The method of any of paragraph AA-EE, wherein the rAAV vector further comprises CMV promoter or a synthetic promoter, operatively linked to the phosphatase inhibitor protein.

[0977] GG. The method of any of paragraphs AA-FF, wherein the rAAV is selected from the group consisting of AAV2, AAV6, AAV8, AAV9, AAV2i8, rh10, AAV2.5 and AAV2G9.

[0978] HH. The method of any of paragraphs AA-GG, wherein the administration of the total dose is performed in five sub-doses, each sub-dose is administered over a period of time of 1-5 minutes.

[0979] II. The method of any of paragraph AAHH, the five sub-doses are administered over a period of about 20 minutes to about 30 minutes.

[0980] JJ. The method of any of paragraphs AA-II, wherein at least one total dose of the rAAV is 10¹³ vg, 3×10¹³ vg, 10¹⁴ vg, 3×10¹⁴ vg, or, 10¹⁵ vg.

[0981] KK. The method of any of the preceding paragraphs, wherein at least one subdose of the rAAV is 10¹³ vg, 3×10¹³ vg, 10¹⁴ vg, 3×10¹⁴ vg, or, 10¹⁵ vg.

[0982] LL. A method of treating a patient having congestive heart failure, comprising: administering to a patient, at least one dose of a rAAV vector, wherein the rAAV vector is AAV2i8 and comprises a nucleic acid encoding phosphatase inhibitor 1 (I-1) operatively linked to a promoter selected from: a CMV promoter, a cardiac-specific promoter selected from Table 2A or a variant thereof, or a muscle-specific promoter active in cardiac and skeletal muscle selected from Table 5A, or, Table 13A,or a variant thereof.

[0983] MM. The method of paragraph LL, wherein the I-1 comprises amino acids 1-65 of SEQ ID NO: 1 or a functional fragment thereof, wherein the threonine at position 35 of SEQ ID NO: 1 is replaced with an aspartate acid (T35D).

[0984] NN. The method of paragraphs LL to MM, wherein the nucleic acid encoding phosphatase inhibitor encodes a constitutively active fragment of I-1 (I-1c) comprising a fragment of SEQ ID NO: 1, wherein the fragment is selected from: amino acids 1-54 of SEQ ID NO: 1, 1-61 of SEQ ID NO: 1, 1-65 of SEQ ID NO: 1, 1-66 of SEQ ID NO: 1, 1-67 of SEQ ID NO: 1 or 1-77 of SEQ ID NO: 1, or a functional variant thereof, wherein the threonine at position 35 of SEQ ID NO: 1 is replaced with an aspartate acid (T35D).

[0985] OO. The method of any of paragraphs LL-NN, wherein the heart failure comprises ischemia, arrhythmia, myocardial infarction, abnormal heart contractibility, or abnormal Ca2+ metabolism.

[0986] PP. The method of any of paragraphs LL-OO, wherein the administration is into the lumen of the coronary artery of the heart of the patient.

[0987] QQ. The method of any of paragraphs LL-PP, wherein the at least one dose is a total dose-range of about 10¹³ vg to about 10¹⁵ vg., administered in 2 to 5 sub-doses.

[0988] RR. An adeno-associated virus (AAV) vector comprising a nucleic acid sequence encoding a polypeptide comprising at least amino acids 1-54 of SEQ ID NO: 1, wherein threonine at amino acid 35 of SEQ ID NO: 1 is replaced with an aspartic acid, and wherein said nucleic acid sequence is operably linked to a promoter selected from any of: a CMV promoter, a cardiac-specific promoter selected from Table 2A or a variant thereof, or a muscle-specific promoter active in cardiac and skeletal muscle selected from Table 5A, or, Table 13A, or a variant thereof.

[0989] SS. The AAV vector of paragraph RR, wherein the polypeptide is selected from: amino acids 1-54 of SEQ ID NO: 1, amino acids 1-61 of SEQ ID NO: 1, amino acids 1-65 of SEQ ID NO: 1, amino acids 1-66 of SEQ ID NO: 1, amino acids 1-67 of SEQ ID NO: amino acids 1 or 1-77 of SEQ ID NO: 2, or a functional variant thereof, wherein the threonine at position 35 of SEQ ID NO: 1 is replaced with an aspartate acid (T35D).

[0990] TT. The AAV vector of paragraph RR, wherein the AAV is selected from the group consisting of adeno-associated virus-1 (AAV1), AAV2, AAV3, AAV4, AAV5, AAV6, AAV7, AAV8, AAV9 and AAV2i8.

[0991] UU. A pharmaceutical composition comprising: (i) adeno-associated virus (AAV) vector comprising a nucleic acid sequence encoding a polypeptide comprising at least amino acids 1-54 of SEQ ID NO: 1, wherein threonine at amino acid 35 of SEQ ID NO: 1 is replaced with an aspartic acid (T35D), and wherein said nucleic acid sequence is operably linked to a cardiac-specific promoter selected from Table 2A or a variant thereof, or a muscle-specific promoter active in cardiac and skeletal muscle selected from Table 5A, or, Table 13A, or a variant thereof; and (ii) a pharmaceutically acceptable carrier.

[0992] VV. The pharmaceutical composition of paragraph UU, wherein the AAV vector comprises a nucleic acid sequence encoding a polypeptide selected from: amino acids 1-54 of SEQ ID NO: 1, amino acids 1-61 of SEQ ID NO: 1, amino acids 1-65 of SEQ ID NO: 1, amino acids 1-66 of SEQ ID NO: 1, amino acids 1-67 of SEQ ID NO: amino acids 1 or 1-77 of SEQ ID NO: 2, or a functional variant thereof, wherein the threonine at position 35 of SEQ ID NO: 1 is replaced with an aspartate acid (T35D).

[0993] WW. The AAV vector of paragraph UU or VV, wherein the AAV is selected from the group consisting of adeno-associated virus-1 (AAV1), AAV2, AAV3, AAV4, AAV5, AAV6, AAV7, AAV8, AAV9 and AAV2i8.

[0994] XX. The AAV vector of paragraph 49, wherein the AAV is AAV9 or AAV2i8.

[0995] All aspects of the compositions and methods of the technology disclosed herein can be defined in any one or more of the following numbered paragraphs:

[0996] 1. A method of treating a patient having a heart failure, comprising:

[0997] administering into heart cells of the patient having a classification of congestive heart failure (CHF), at least one total dose of a rAAV vector comprising a nucleic acid sequence encoding a phosphatase inhibitor (I-1) protein that inhibits phosphatase activity, wherein, at least one dose of the rAAV is selected from a total dose-range of about 10¹³ vg to about 10¹⁵ vg, and wherein, at least twelve months post-administration, there is an improvement in the classification of congestive heart failure.

[0998] 2. The method of paragraph 1, wherein the classification is based upon a classification system used by the American Heart Association (AHA), the American College of Cardiology (ACC), Minnesota LIVING WITH HEART FAILURE® Questionnaire (MLHFQ), Kansas City Cardiomyopathy questionnaire (KCCQ), or the 2016 European Society of Cardiology guidelines (ESCG), the Japanese heart failure Society (JHFS) guidelines, The Japanese Circulation Society (JCS) Guidelines, or, the New York Heart Association (NYHA).

[0999] 3. The method of paragraph 1 or 2, wherein there is an improvement in the classification of at least one level 12 months after administration of the rAAV.

[1000] 4. The method of paragraph 1 or 2, wherein there is an improvement in the classification of at least one level within six months after administration of the rAAV.

[1001] 5. The method of paragraph 1, wherein twelve months post-administration, there is an improvement of at least 2 levels in the Classification.

[1002] 6. The method of any of paragraphs 1-5, wherein the classification system is NYHA and the level of classification is selected from the group consisting of: Class I, Class II, Class III, and Class IV.

[1003] 7. The method of any of paragraphs 1-5, wherein the classification system is the American College of Cardiology/American Heart Association (ACC/AHA) complementary staging system and the level of classification is selected from the group consisting of: Stages A, Stage B, Stage C, Stage D.

[1004] 8. The method of any of paragraphs 1-5, wherein the classification system is KCCQ and the level of classification is a KQQC overall summary score range selected from the group consisting of: KCCQ fair to excellent scores of 50 to 100, very poor to fair scores of 0 to 49, good to excellent scores of 75 to 100, and very poor to good scores of 0 to 74. ***

[1005] 9. A method of treating a patient having cardiomyopathy, comprising:

[1006] administering into heart cells of the patient at least one total dose of a rAAV vector comprising a nucleic acid sequence encoding a phosphatase inhibitor (I-1) protein that inhibits phosphatase activity, wherein, at least one dose of the rAAV is selected from a total dose-range of about 10¹³ vg to about 10¹⁵ vg, and wherein, at least twelve months post-administration there is an improvement in the at least one parameter from a baseline level in the patient, where the at least one parameter is selected from the group consisting essentially of: ejection fraction (EF), end systolic volume (ESV), cardiac contractility, selected from ejection fraction (EF) and fractional shortening (FS), cardiac volumes selected from any of: end diastolic volume (DV) and end systolic volume (ESV), functional criteria, selected from any of: a 6-minute walk test (6MWT), exercise and VO2max; BNP level, Pro-BNP level, biomarker level, wherein the biomarker level is selected from the group of: troponin, serum creatinine, cystatin-C, or hepatic transaminases, Patient-reported outcomes (PROs), such as reduced symptoms, health-related quality of life (HRQOL), or patient perceived health status, and decrease in any of: mortality risk due to heart failure, reduced hospitalization due to heart failure symptoms, or therapeutic intervention for treatment of heart failure.

[1007] 10. The method of paragraph 9, wherein there is an improvement of at least 2 parameters at least 12 months after administration.

[1008] 11. The method of paragraph 10, wherein there is an improvement of at least 3 parameters at least 12 months after administration.

[1009] 12. The method of paragraph 11, wherein there is an improvement of at least 4 parameters at least 12 months after administration.

[1010] 13. The method of paragraph 12, wherein there is an improvement of at least 5 parameters at least 12 months after administration.

[1011] 14. The method of paragraph 9, wherein the improvement is selected from any of: at least a 5% or more increase in ejection fraction from baseline, at least a 10% decrease, or at least a 20 ml decrease in end systolic volume from baseline, at least a 50-meter increase in 6-minute walk test from baseline,at least a 40% decrease in BNP levels (pg/ml) in the blood from baseline, at least a 35% decrease in pro-BNP levels (pg/ml) in the blood from baseline, at least a 10% reduction in a biomarker selected from: troponin, serum creatinine, cystatin-C, or hepatic transaminases from a baseline level of the same biomarker, at least a 1.5 ml/kg/min increase in myocardial oxygen consumption (MVO2) from baseline,or a discharge from hospital due to improved HF symptoms, or a reduced intervention selected from a decrease in the use of any of: inotropes, vasodilators, diuretcis due to improved HF symptoms in the subject.

[1012] 15. The method of paragraph 1 or 14, wherein the rAAV vector further comprises CMV promoter or a synthetic promoter, operatively linked to the phosphatase inhibitor protein.

[1013] 16. The method of any of paragraphs 1-15, wherein the total dose is administered as any of the following administration methods: over a period of time of about 20 minutes to about 30 minutes, administered in a series of sub-doses, wherein each sub-dose is administered over a period of time of about 1 minute to about 5 minutes, administered in a series of five sub-doses, each sub-dose is administered over a period of time of about minute to about 5 minutes, and wherein the five sub-doses are administered over a period of about 20 minutes to about 30 minutes.

[1014] 17. The method of any of paragraphs 1-16, wherein there rAAV vector comprises a capsid that detargets the liver.

[1015] 18. The method of any of paragraphs 1-17, wherein the rAAV is selected from the group consisting of AAV 1, AAV2, AAV6, AAV8, AAV9, AAV2i8, rh 10, AAV2.5 and AAV2G9.

[1016] 19. The method of any of paragraphs 1-18, wherein the rAAV vector is AAV2i8.

[1017] 20. The method of any of paragraphs 1-19, wherein at least one total dose of the rAAV is 10¹³ vg, 3×10¹³ vg, 10¹⁴ vg, 3×10¹⁴ vg, or, 10¹⁵ vg.

[1018] 21. The method of any of paragraphs 1-20, wherein the phosphatase inhibitor (I-1) protein is a constitutively active protein (I-1c).

[1019] 22. The method of paragraph 21, wherein the s I-1c is selected from any of: (a) a polypeptide comprises at least amino acid residues 1-54 of SEQ ID NO: 1, wherein SEQ ID NO: 1 is truncated at the C-terminus at amino acid 70, 67, 66, 65, or 61, or 54, and where the there is an aspartic acid at position 35 (T35D), (b) a polypeptide comprising amino acids 1-54 of SEQ ID NO:1 or a functional fragment thereof, wherein the functional fragment has at least 85% sequence identity to amino acid residues 1-54 of SEQ ID NO: 1, or truncated at the C-terminus at amino acid 70, 67, 66, 65, or 61, or 54, and where the there is an aspartic acid at position 35 (T35D).

[1020] 23. The method of any of paragraphs 1-21, wherein the rAAV genome comprises nucleic acid sequence selected from the group consisting of: SEQ ID NO: 413-441.

[1021] 24. The method of paragraph 21, wherein the nucleic acid sequence encoding the I-1 polypeptide is selected from: (a0 a nucleic acid sequence encoding a polypeptide comprising amino acids 1-65 of SEQ ID NO: 1, wherein threonine (T) at position 35 of SEQ ID NO: 1 is replaced with an amino acid that is not T, (b) a nucleic acid sequence encoding a polypeptide comprising amino acids 1-65 of SEQ ID NO: 1, wherein threonine (T) at position 35 of SEQ ID NO: 1 is replaced with an acid amino acid selected from any of: aspartic acid (D), glutamic acid (E), asparagine (N), glutamine (Q), (c) a nucleic acid sequence encoding a polypeptide comprising amino acids 1-65 of SEQ ID NO: 1, wherein threonine (T) at position 35 of SEQ ID NO: 1 is replaced with aspartic acid (D), or a conservative amino acid of aspartic acid.

[1022] 25. The method of any of paragraphs 1-24, wherein the nucleic acid sequence encoding the I-1 protein is a codon optimized nucleic acid sequence.

[1023] 26. The method of any of paragraphs 1-25, wherein the nucleic acid sequence encoding the I-1 protein is selected from any of SEQ ID NO: 385-412, or a nucleic acid sequence having at least 80% sequence identity to SEQ ID NO: 385-412.

[1024] 27. The method of any of paragraphs 1-26, wherein the subject with cardiomyopathy has non-ischemic heart failure and/or non-ischemic cardiomyopathy.

[1025] 28. The method of any of paragraphs 1-27, wherein the subject with cardiomyopathy has a congenital cardiomyopathy or a genetic disorder with a cardiac manifestation.

[1026] 29. The method of paragraph 29, wherein the subject with a congenital cardiomyopathy or a genetic disorder with a cardiac manifestation has a disease or disorder selected from the group consisting of: Arrhythmogenic right ventricular cardiomyopathy, Atrial myxoma, familial, Atrial septal defect ostium primum, Atrial septal defect sinus venosus, Barth syndrome, muscular dystrophy, Buerger disease, Cardioencephalomyopathy, Chromosome 1p36 deletion syndrome, Congenital generalized lipodystrophy type 4, Congenital heart block, Dilated cardiomyopathy, Duchenne muscular dystrophy (DMD), Fabry disease, Familial atrial fibrillation, Familial dilated cardiomyopathy, Familial hypertrophic cardiomyopathy, Familial progressive cardiac conduction defect, Familial thoracic aortic aneurysm and aortic dissection, Fibromuscular dysplasia, Friedreich ataxia, Gaucher disease, Glycogen storage disease (types 2, 3 or 4), His bundle tachycardia, Hurler syndrome, Hypoplastic left heart syndrome, Infantile histiocytoid cardiomyopathy, Intracranial arteriovenous malformation, Isobutyryl-CoA dehydrogenase deficiency, Kallikrein hypertension, Kawasaki disease, Kearns-Sayre syndrome, Left ventricular noncompaction, Limb-girdle muscular dystrophy (types 1B, 2E, 2F, 2M, 2C, 2D), Limited systemic sclerosis, Long QT syndrome 1, Lymphedema and cerebral arteriovenous anomaly, Lymphocytic vasculitis, Microcephaly-cardiomyopathy; Mitochondrial encephalomyopathy lactic acidosis and stroke-like episodes, Mitochondrial trifunctional protein deficiency, Myotonic dystrophy type 1, Neonatal stroke, Noonan syndromes 1 -, 2-, 3-, 4-, 5- and 6, Peripartum cardiomyopathy, Peters plus syndrome, PGM1-CDG, PHACE syndrome, Phospholamban Arg 14 Deletion, Postural orthostatic tachycardia syndrome, Primary carnitine deficiency, Progressive familial heart block (types 1A, 1B and 2), Pseudohypoaldosteronism type 2, Pulmonary arterial hypertension, Pulmonary atresia with intact ventricular septum, Pulmonary atresia with ventricular septal defect, Pulmonary valve stenosis, Pulmonary vein stenosis, Pulmonic stenosis, Renoprival hypertension, Retinal arterial macroaneurysm with supravalvular pulmonic stenosis, Right ventricle hypoplasia, Sarcoidosis, Sengers syndrome, Situs inversus, Sudden Arrhythmia Death Syndrome, Supravalvular aortic stenosis, Swyer syndrome, TANGO2-Related Metabolic Encephalopathy and Arrhythmias, TARP syndrome, Tetralogy of Fallot, Timothy syndrome, Tricuspid atresia, Vici syndrome, VLCAD deficiency and Williams syndrome.

[1027] 30. The method of any of paragraphs 1-29, wherein the subject with cardiomyopathy has an ischemic cardiomyopathy.

[1028] 31. The method of any of paragraphs 1-30, wherein the subject with cardiomyopathy has heart failure.

[1029] 32. The method of paragraph 31, wherein the subject with heart failure has a classification that is equivalent to class III or above in the New York Heart Association (NYHA) classification system.

[1030] 33. The method of any of paragraphs 30-32, wherein the subject with heart failure has a cardiovascular disease or heart disease is selected from any of: congestive heart failure (CHF), left ventricular remodeling, peripheral arterial occlusive disease (PAOD), dilated cardiomyopathy (DCM) including idiopathic dilated cardiomyopathy (IDCM), coronary artery disease, ischemia, arrhythmia, myocardial infarction (MI), abnormal heart contractility, acute (decompensated) heart failure (AHF), abnormal Ca2+ metabolism, myocardial ischemia, atherosclerosis, cardiomyopathy, idiopathic cardiomyopathy, genetic disorder induced cardiomyopathy, cardiac arrhythmias, muscular dystrophy, muscle mass abnormality, muscle degeneration, infective myocarditis, drug- or toxin-induced muscle abnormalities, hypersensitivity myocarditis, an autoimmune endocarditis and congenital heart disease and pulmonary heart hypertension.

[1031] 34. The method of any of paragraphs 1-33, wherein the subject with cardiomyopathy has reduced ejection fraction (rEF or HFrEF), or, preserved ejection fraction (HFpEF).

[1032] 35. The method of any of paragraphs 1-34, wherein at least twelve months post-administration of the rAAV there is an improvement of at least one class in a classification of heart failure from a baseline level, wherein the classification of heart failure is assessed by at least one of the following: (a) a classification system used by the American Heart Association (AHA), the American College of Cardiology (ACC), the 2016 European Society of Cardiology guidelines (ESCG), the Japanese heart failure Society (JHFS) guidelines, The Japanese Circulation Society (JCS) Guidelines, or, the New York Heart Association (NYHA); or equivalent thereof, or (b) a health-related quality of life (HRQL) questionnaire selected from the group consisting from any of: Minnesota LIVING WITH HEART FAILURE® Questionnaire (MLHFQ), or Kansas City Cardiomyopathy questionnaire (KCCQ), Chronic Heart Failure Questionnaire (CHFQ), Quality of Life Questionnaire for Severe Heart Failure (QLQ-SHF), Left Ventricular Dysfunction (LVD-36) questionnaire, and the Left Ventricular Disease Questionnaire (LVDQ).

[1033] 36. The method of paragraph 35, wherein there is an improvement in the classification of at least one level within six months after administration of the rAAV.

[1034] 37. The method of paragraph 35, wherein there is an improvement in the classification of at least two levels within twelve months after administration of the rAAV.

[1035] 38. The method of paragraph 35, wherein there is an improvement of at least a 10 point decrease in quality of life MLWHFQ or KCCQ from the baseline level.

[1036] 39. The method of any of paragraphs 1-38, wherein the subject is administered a vasodilator concurrent with and/or, before, and/or, after the administration of the at least one total dose of a rAAV vector.

[1037] 40. The method of any of paragraphs 1-39, wherein the subject is administered an immune modulator concurrent with, or before, or after the administration of the at least one total dose of a rAAV vector.

[1038] 41. A pharmaceutical composition comprising an AAV vector that comprises a codon optimized I-Ic nucleic sequence selected from any of SEQ ID NO: 385-412, or nucleic acid sequence having at least 80% sequence identity to SEQ ID NOS: 385-412.

[1039] 42. The pharmaceutical composition of paragraph 41, wherein the codon optimized nucleic acid sequence is operably linked to a CMV promoter or a synthetic promoter.

[1040] 43. The pharmaceutical composition of paragraph 41, comprising a nucleic acid sequence selected from the group consisting of: SEQ ID NO: 41-42, or a nucleic acid sequence having at least 80% sequence identity to SEQ ID NOS: 385-412.

[1041] 44. The pharmaceutical composition of any of paragraphs 41-43, for the use in a method according to any of paragraphs 1-40.

[1042] 45. An adeno-associated virus (AAV) vector comprising a nucleic acid sequence encoding a Phosphatase inhibitor (I-1) polypeptide operably linked to a promoter selected from any of a cardiac-specific promoter selected from Table 2A or a variant thereof, a muscle-specific promoter active in cardiac and skeletal muscle, or a variant thereof, or any promoter when a cardiac tissue specific enhancer is present.

[1043] 46. The AAV vector of paragraph 45, wherein muscle-specific promoter active in cardiac and skeletal muscle is selected from Table 5A or Table 13A or a variant thereof.

[1044] 47. The AAV vector of any of paragraphs 45-46, wherein the AAV is selected from the group consisting of adeno-associated virus-1 (AAV1), AAV2, AAV3, AAV4, AAV5, AAV6, AAV7, AAV8, AAV9 and AAV2i8.

[1045] 48. The AAV vector of any of paragraphs 45-47, wherein the AAV comprises a capsid that detargets the liver.

[1046] 49. The AAV vector of any of paragraph 45-48, wherein the AAV is AAV2i8.

[1047] 50. The AAV vector of any of paragraphs 45-49, wherein the phosphatase inhibitor (I-1) polypeptide is a constitutively active protein (I-1c).

[1048] 51. The AAV vector of any of paragraphs 45-50, wherein the I-1c is selected from any of: (a) a polypeptide comprises at least amino acid residues 1-65 of SEQ ID NO: 1 or a functional equivalent thereof, (b) a polypeptide comprising at least amino acids 1-54 of SEQ ID NO: 1, wherein the polypeptide is truncated at a C-terminus at amino acid selected from residue 70, 67, 66, 65, or 61, or 54, and where the there is an aspartic acid at position 35 (T35D), (c) a polypeptide comprising amino acids 1-65 of SEQ ID NO:1 or a functional equivalent thereof having at least 85% sequence identity to amino acid residues 1-65 of SEQ ID NO: 1, or, (d) a polypeptide selected from any of: SEQ ID NOS: 507 or 527-532 or a functional equivalent thereof having at least 85% sequence identity to amino acid residues of any of SEQ ID NOS: 507 or 527-532.

[1049] 52. The AAV vector of any of paragraphs 45-51, wherein the nucleic acid sequence encoding a I-1 polypeptide is selected from: (a) a nucleic acid sequence encoding a polypeptide comprising amino acids 1-65 of SEQ ID NO: 1, wherein threonine (T) at position 35 of SEQ ID NO: 1 is replaced with an amino acid that is not T, (b) a nucleic acid sequence encoding a polypeptide comprising amino acids 1-65 of SEQ ID NO: 1, wherein threonine (T) at position 35 of SEQ ID NO: 1 is replaced with an acid amino acid selected from any of: aspartic acid (D), glutamic acid (E), asparagine (N), glutamine (Q), (c) a nucleic acid sequence encoding a polypeptide comprising amino acids 1-65 of SEQ ID NO: 1, wherein threonine (T) at position 35 of SEQ ID NO: 1 is replaced with aspartic acid (D), or a conservative amino acid of aspartic acid.

[1050] 53. The AAV vector of any of paragraphs 45-52, wherein the polypeptide is selected from: amino acids 1-54 of SEQ ID NO: 1, amino acids 1-61 of SEQ ID NO: 1, amino acids 1-65 of SEQ ID NO: 1, amino acids 1-66 of SEQ ID NO: 1, amino acids 1-67 of SEQ ID NO: amino acids 1 or 1-77 of SEQ ID NO: 2, or a functional variant thereof, wherein the threonine at position 35 of SEQ ID NO: 1 is replaced with an aspartate acid (T35D), or a conservative amino acid of aspartate.

[1051] 54. The AAV vector of any of paragraphs 45-50, wherein the nucleic acid sequence encoding the I-1 polypeptide is a codon optimized nucleic acid sequence.

[1052] 55. The AAV vector of any of paragraphs 45-54, wherein the codon optimized nucleic acid sequence has reduced CpG content or reduced CpG islands as compared to the wild-type reference sequence of a SEQ ID NO: 1, or a fragment thereof.

[1053] 56. The AAV vector of any of paragraphs 45-54, wherein the nucleic acid sequence encoding the I-1 polypeptide is a codon optimized nucleic acid sequence selected from any of: SEQ ID NO: 385-412 or a nucleic acid sequence at least 80% sequence identity to SEQ ID NO: 385-412

[1054] 57. The AAV vector of any of paragraph 45-56, further comprising at least one ITR located 5′ of the nucleic acid sequence encoding a Phosphatase inhibitor (I-1) polypeptide operably linked to the cardiac-specific promoter or muscle-specific promoter.

[1055] 58. The AAV vector of any of paragraph 45-57, further comprising at least two ITRs flanking the nucleic acid sequence encoding a Phosphatase inhibitor (I-1) polypeptide operably linked to the cardiac-specific promoter or muscle-specific promoter.

[1056] 59. The AAV vector of any of paragraph 45-58, wherein the ITR sequences are selected from any one or more of: SEQ ID NO: 70-78, or a nucleic acid having at least 85% sequence identity to SEQ ID NO: 70-78.

[1057] 60. The AAV vector of any of paragraphs 45-59, further comprising a reverse poly A sequence or double stranded RNA termination element, wherein the reverse polyA sequence or double stranded termination element are located 3′ of the nucleic acid sequence encoding a Phosphatase inhibitor (I-1) polypeptide.

[1058] 61. The AAV vector of paragraph 60, wherein the reverse poly A sequence, or double stranded RNA termination element is located between 3′ of the nucleic acid sequence encoding a Phosphatase inhibitor (I-1) polypeptide and 5′ of the right ITR.

[1059] 62. The AAV vector of any of paragraphs 45-61, wherein the nucleic acid sequence can further comprise a nucleic acid sequence encoding at least one immune modulator.

[1060] 63. The AAV vector of any of paragraphs 45-61, present in a composition or solution, further comprising an immune modulator.

[1061] 64. The AAV vector of any of paragraphs 45-63, further comprising a polyA sequence selected from any of SV40 polyA (SEQ ID NO: 334), HGH poly A (SEQ ID NO: 66), SEQ ID NO: 284-287, SEQ ID NO 331-335, wherein the polyA sequence is located 3′ of the nucleic acid sequence encoding a Phosphatase inhibitor (I-1) polypeptide.

[1062] 65. A pharmaceutical composition comprising: (i) adeno-associated virus (AAV) vector comprising : (i) a nucleic acid sequence encoding a Phosphatase inhibitor (I-1) polypeptide operably linked to any one of: (a) a cardiac-specific promoter selected from Table 2A or a variant thereof, (b) a muscle-specific promoter active in cardiac and skeletal muscle, or (c) any promoter when a cardiac tissue specific enhancer is present, or a variant thereof; and (ii) a pharmaceutically acceptable carrier.

[1063] 66. The pharmaceutical composition of paragraph 65, wherein muscle-specific promoter active in cardiac and skeletal muscle is selected from Table 5A or Table 13A or a variant having at least 85% sequence identity thereof.

[1064] 67. The pharmaceutical composition of paragraphs 65-66, wherein the AAV is selected from the group consisting of adeno-associated virus-1 (AAV1), AAV2, AAV3, AAV4, AAV5, AAV6, AAV7, AAV8, AAV9 and AAV2i8.

[1065] 68. The pharmaceutical composition of paragraphs 65-67, wherein the AAV comprises a capsid that detargets the liver.

[1066] 69. The pharmaceutical composition of any of paragraphs 65-68, wherein the AAV is AAV2i8.

[1067] 70. The pharmaceutical composition of any of paragraphs 65-69, wherein the AAV comprises a nucleic acid selected from the group consisting of SEQ ID NO: 413-440, or a nucleic acid sequence at least 80% sequence identity to a sequence selected from SEQ ID NO: 413-440, wherein the nucleic acids seet forth in SEQ ID NO: 413-440 comprise a CMV promoter of SEQ ID NO: 330, wherein the CMV promoter of SEQ ID NO: 330 is replaced by any of: (a) a cardiac-specific promoter selected from Table 2A or a variant having at least 85% sequence identity thereof, (b) a muscle-specific promoter active in cardiac and skeletal muscle (e.g., a muscle-specific promoter active in cardiac and skeletal muscle is selected from Table 5A or Table 13A or a variant having at least 85% sequence identity thereof), or (c) any promoter when a cardiac tissue specific enhancer is present, or a variant thereof 71. The pharmaceutical composition of any of paragraphs 64-69, further comprises a vasodilator.

[1068] 72. The pharmaceutical composition of any of paragraphs 64-69, further comprises an immune modulator.

[1069] 73. The pharmaceutical composition of paragraph 65, wherein the phosphatase inhibitor (I-1) polypeptide is a constitutively active protein (I-1c).

[1070] 74. The pharmaceutical composition of paragraph 73, wherein the I-1c is selected from any of: (a) a polypeptide comprises at least amino acid residues 1-65 of SEQ ID NO: 1 or a functional equivalent thereof; (b) a polypeptide comprising at least amino acids 1-54 of SEQ ID NO: 1, wherein the polypeptide is truncated at the C-terminus at amino acid 70, 67, 66, 65, or 61, or 54, and where the there is an aspartic acid at position 35 (T35D), (c) a polypeptide comprising amino acids 1-65 of SEQ ID NO:1 or a functional equivalent thereof having at least 85% sequence identity to amino acid residues 1-65 of SEQ ID NO: 1, or (d) a polypeptide selected from any of: SEQ ID NOS: 507 or 527-532 or a functional equivalent thereof having at least 85% sequence identity to amino acid residues of any of SEQ ID NOS: 507 or 527-532.

[1071] 75. The pharmaceutical composition of any of paragraphs 65-74, wherein the nucleic acid sequence encoding a I-1 polypeptide is selected from: (a) a nucleic acid sequence encoding a polypeptide comprising amino acids 1-65 of SEQ ID NO: 1, wherein threonine (T) at position 35 of SEQ ID NO: 1 is replaced with an amino acid that is not T, (b) a nucleic acid sequence encoding a polypeptide comprising amino acids 1-65 of SEQ ID NO: 1, wherein threonine (T) at position 35 of SEQ ID NO: 1 is replaced with an acid amino acid selected from any of: aspartic acid (D), glutamic acid (E), asparagine (N), glutamine (Q), (c) a nucleic acid sequence encoding a polypeptide comprising amino acids 1-65 of SEQ ID NO: 1, wherein threonine (T) at position 35 of SEQ ID NO: 1 is replaced with aspartic acid (D), or a conservative amino acid of aspartic acid.

[1072] 76. The pharmaceutical composition of any of paragraphs 65-745, wherein the nucleic acid sequence encoding the I-1 protein is a codon optimized nucleic acid sequence.

[1073] 77. The pharmaceutical composition of paragraph 76, wherein the codon optimized nucleic acid sequence has reduced CpG content as compared to a reference wild type sequence.

[1074] 78. The pharmaceutical composition of any of paragraphs 65-77, wherein the codon optimized nucleic acid sequence encoding the I-1 polypeptide is selected from any of SEQ ID NO: 385-412, or a nucleic acid sequence having at least 80% sequence identity to a sequence selected from any of SEQ ID NOS: 385-412.

[1075] 79. Use of an AAV vector according to any one of paragraphs 45-64, for the manufacturer of a pharmaceutical composition for the treatment of a subject having cardiomyopathy.

[1076] 80. The use of the AAV vector of paragraph 79, wherein the subject with cardiomyopathy has non-ischemic heart failure and/or non-ischemic cardiomyopathy.

[1077] 81. The use of the AAV vector of any of paragraphs 79-80, wherein the subject with cardiomyopathy has a congenital cardiomyopathy or a genetic disorder with a cardiac manifestation.

[1078] 82. The use of the AAV vector of paragraph 81, wherein the subject with a congenital cardiomyopathy or a genetic disorder with a cardiac manifestation has a disease or disorder selected from the group consisting of: Arrhythmogenic right ventricular cardiomyopathy, Atrial myxoma, familial, Atrial septal defect ostium primum, Atrial septal defect sinus venosus, Barth syndrome, muscular dystrophy, Buerger disease, Cardioencephalomyopathy, Chromosome 1p36 deletion syndrome, Congenital generalized lipodystrophy type 4, Congenital heart block, Dilated cardiomyopathy, Duchenne muscular dystrophy (DMD), Fabry disease, Familial atrial fibrillation, Familial dilated cardiomyopathy, Familial hypertrophic cardiomyopathy, Familial progressive cardiac conduction defect, Familial thoracic aortic aneurysm and aortic dissection, Fibromuscular dysplasia, Friedreich ataxia, Gaucher disease, Glycogen storage disease (types 2, 3 or 4), His bundle tachycardia, Hurler syndrome, Hypoplastic left heart syndrome, Infantile histiocytoid cardiomyopathy, Intracranial arteriovenous malformation, Isobutyryl-CoA dehydrogenase deficiency, Kallikrein hypertension, Kawasaki disease, Kearns-Sayre syndrome, Left ventricular noncompaction, Limb-girdle muscular dystrophy (types 1B, 2E, 2F, 2M, 2C, 2D), Limited systemic sclerosis, Long QT syndrome 1, Lymphedema and cerebral arteriovenous anomaly, Lymphocytic vasculitis, Microcephaly-cardiomyopathy; Mitochondrial encephalomyopathy lactic acidosis and stroke-like episodes, Mitochondrial trifunctional protein deficiency, Myotonic dystrophy type 1, Neonatal stroke, Noonan syndromes 1 -, 2-, 3-, 4-, 5- and 6, Peripartum cardiomyopathy, Peters plus syndrome, PGM 1-CDG, PHACE syndrome, Phospholamban Arg 14 Deletion, Postural orthostatic tachycardia syndrome, Primary carnitine deficiency, Progressive familial heart block (types 1A, 1B and 2), Pseudohypoaldosteronism type 2, Pulmonary arterial hypertension, Pulmonary atresia with intact ventricular septum, Pulmonary atresia with ventricular septal defect, Pulmonary valve stenosis, Pulmonary vein stenosis, Pulmonic stenosis, Renoprival hypertension, Retinal arterial macroaneurysm with supravalvular pulmonic stenosis, Right ventricle hypoplasia, Sarcoidosis, Sengers syndrome, Situs inversus, Sudden Arrhythmia Death Syndrome, Supravalvular aortic stenosis, Swyer syndrome, TANGO2-Related Metabolic Encephalopathy and Arrhythmias, TARP syndrome, Tetralogy of Fallot, Timothy syndrome, Tricuspid atresia, Vici syndrome, VLCAD deficiency and Williams syndrome.

[1079] 83. The use of the AAV vector of paragraph 79, wherein the subject with cardiomyopathy has an ischemic cardiomyopathy.

[1080] 84. The use of the AAV vector of paragraph 79, wherein the subject with cardiomyopathy has heart failure.

[1081] 85. The use of the AAV vector of paragraph 84, wherein the subject with heart failure has a classification of heart failure based upon a classification system used by the American Heart Association (AHA), the American College of Cardiology (ACC) or the New York Heart Association (NYHA).

[1082] 86. The use of the AAV vector of paragraph 85, wherein the subject with heart failure has a classification of a class III or above class III in the New York Heart Association (NYHA) classification system.

[1083] 87. Use of an AAV vector according to any one of paragraphs 45-64, for the manufacturer of a pharmaceutical composition for the treatment of a subject having a condition or disease associated with heart failure.

[1084] 88. The use of paragraph 87, wherein the subject has a classification of congestive heart failure (CHF).

[1085] 89. The use of paragraph 87, wherein the classification is based upon a classification system used by the American Heart Association (AHA), the American College of Cardiology (ACC) or the New York Heart Association (NYHA).

[1086] 90. The use of paragraph 87, wherein the subject has non-ischemic heart failure or non-ischemic cardiomyopathy.

[1087] 91. The use of paragraph 87, wherein the subject has ischemic heart failure or ischemic cardiomyopathy.

[1088] 92. The use of any of paragraphs 79 or 87, wherein the subject has reduced ejection fraction (rEF or HFrEF).

[1089] 93. A cell comprising the AAV vector of any of paragraphs 45-64.

[1090] 94. The cell of paragraph 93, wherein the cell is a cardiac cell or muscle cells.

[1091] 95. The cell of any of paragraphs 93-94, wherein the cell is in cell culture or a cell present in a subject.

[1092] 96. An AAV vector according to paragraphs 45-64, a pharmaceutical formulation of any of paragraphs 65-78, or a cell according any of paragraphs 93-95 for use in the treatment of a subject having cardiomyopathy.

[1093] 97. The AAV vector of paragraph 96, wherein the subject with cardiomyopathy has non-ischemic heart failure and/or non-ischemic cardiomyopathy.

[1094] 98. The AAV vector of paragraph 96, wherein the subject with cardiomyopathy has a congenital cardiomyopathy or a genetic disorder with a cardiac manifestation.

[1095] 99. The AAV vector of paragraph 98, wherein the subject with a congenital cardiomyopathy or a genetic disorder with a cardiac manifestation has a disease or disorder selected from the group consisting of: Arrhythmogenic right ventricular cardiomyopathy, Atrial myxoma, familial, Atrial septal defect ostium primum, Atrial septal defect sinus venosus, Barth syndrome, muscular dystrophy, Buerger disease, Cardioencephalomyopathy, Chromosome 1p36 deletion syndrome, Congenital generalized lipodystrophy type 4, Congenital heart block, Dilated cardiomyopathy, Duchenne muscular dystrophy (DMD), Fabry disease, Familial atrial fibrillation, Familial dilated cardiomyopathy, Familial hypertrophic cardiomyopathy, Familial progressive cardiac conduction defect, Familial thoracic aortic aneurysm and aortic dissection, Fibromuscular dysplasia, Friedreich ataxia, Gaucher disease, Glycogen storage disease (types 2, 3 or 4), His bundle tachycardia, Hurler syndrome, Hypoplastic left heart syndrome, Infantile histiocytoid cardiomyopathy, Intracranial arteriovenous malformation, Isobutyryl-CoA dehydrogenase deficiency, Kallikrein hypertension, Kawasaki disease, Kearns-Sayre syndrome, Left ventricular noncompaction, Limb-girdle muscular dystrophy (types 1B, 2E, 2F, 2M, 2C, 2D), Limited systemic sclerosis, Long QT syndrome 1, Lymphedema and cerebral arteriovenous anomaly, Lymphocytic vasculitis, Microcephaly-cardiomyopathy; Mitochondrial encephalomyopathy lactic acidosis and stroke-like episodes, Mitochondrial trifunctional protein deficiency, Myotonic dystrophy type 1, Neonatal stroke, Noonan syndromes 1 -, 2-, 3-, 4-, 5- and 6, Peripartum cardiomyopathy, Peters plus syndrome, PGM1-CDG, PHACE syndrome, Phospholamban Arg 14 Deletion, Postural orthostatic tachycardia syndrome, Primary carnitine deficiency, Progressive familial heart block (types 1A, 1B and 2), Pseudohypoaldosteronism type 2, Pulmonary arterial hypertension, Pulmonary atresia with intact ventricular septum, Pulmonary atresia with ventricular septal defect, Pulmonary valve stenosis, Pulmonary vein stenosis, Pulmonic stenosis, Renoprival hypertension, Retinal arterial macroaneurysm with supravalvular pulmonic stenosis, Right ventricle hypoplasia, Sarcoidosis, Sengers syndrome, Situs inversus, Sudden Arrhythmia Death Syndrome, Supravalvular aortic stenosis, Swyer syndrome, TANGO2-Related Metabolic Encephalopathy and Arrhythmias, TARP syndrome, Tetralogy of Fallot, Timothy syndrome, Tricuspid atresia, Vici syndrome, VLCAD deficiency and Williams syndrome.

[1096] 100. The AAV vector of paragraph 96, wherein the subject with cardiomyopathy has an ischemic cardiomyopathy.

[1097] 101. The AAV vector of paragraph 96, wherein the subject with cardiomyopathy has heart failure.

[1098] 102. The AAV vector of paragraph 101, wherein the subject with heart failure has a classification of heart failure based upon a classification system used by the American Heart Association (AHA), the American College of Cardiology (ACC) or the New York Heart Association (NYHA).

[1099] 103. The AAV vector of paragraph 102, wherein the subject with heart failure has a classification of a class III or above class III in the New York Heart Association (NYHA) classification system.

[1100] 104. An AAV vector according to paragraphs 45-64, a pharmaceutical formulation of any of paragraphs 65-78, or a cell according any of paragraphs 93-95 for use in the treatment of a patient having heart failure.

[1101] 105. The AAV vector of paragraph 104, wherein the subject has a classification of congestive heart failure (CHF).

[1102] 106. The AAV vector of paragraph 105, wherein the classification is based upon a classification system used by the American Heart Association (AHA), the American College of Cardiology (ACC) or the New York Heart Association (NYHA).

[1103] 107. The AAV vector of paragraph 104, wherein the subject has non-ischemic heart failure or non-ischemic cardiomyopathy.

[1104] 108. The AAV vector of paragraph 104, wherein the subject has ischemic heart failure or ischemic cardiomyopathy.

[1105] 109. The AAV vector of paragraph 96 or 104, wherein the subject has reduced ejection fraction (rEF or HFrEF).

[1106] 110. The AAV vector of paragraph 104, wherein the subject with heart failure has a cardiovascular disease or heart disease is selected from any of: congestive heart failure (CHF), left ventricular remodeling, peripheral arterial occlusive disease (PAOD), dilated cardiomyopathy (DCM) including idiopathic dilated cardiomyopathy (IDCM), coronary artery disease, ischemia, arrhythmia, myocardial infarction (MI), abnormal heart contractility, acute (decompensated) heart failure (AHF), abnormal Ca2+ metabolism, myocardial ischemia, atherosclerosis, cardiomyopathy, idiopathic cardiomyopathy, genetic disorder induced cardiomyopathy, cardiac arrhythmias, muscular dystrophy, muscle mass abnormality, muscle degeneration, infective myocarditis, drug- or toxin-induced muscle abnormalities, hypersensitivity myocarditis, an autoimmune endocarditis and congenital heart disease and pulmonary heart hypertension.

[1107] 111. The AAV vector of paragraph 104, wherein the subject has one or more of: (a) non-ischemic heart failure; (b) non-ischemic cardiomyopathy, (c) a classification of congestive heart failure (CHF) is based upon a classification system used by the American Heart Association (AH), the American College of Cardiology (ACC) or the New York Heart Association (NYHA) or an equivalent classification system thereof, or (d) a reduced ejection fraction (rEFor HFrEF).

[1108] 112. A method of expressing a phosphatase inhibitor (I-1) polypeptide in a subject with cardiomyopathy, the method comprising introducing into the subject with cardiomyopathy, at least one dose of the AAV vector according to any of paragraphs 45-63, wherein the subject with cardiomyopathy has a classification of heart failure, wherein the at least one dose of the rAAV is selected from a total dose-range of about 10¹³ vg to about 10¹⁵ vg, and wherein at least twelve months post-administration there is an improvement in the classification of heart failure.

[1109] 113. The method of paragraph 112, wherein the classification of heart failure is based upon a classification system used by the American Heart Association (AH), the American College of Cardiology (ACC) or the New York Heart Association (NYHA) or an equivalent classification system thereof.

[1110] 114. The method of paragraph 112, wherein there is an improvement of classification of at least one level 12 months after administration of the rAAV.

[1111] 115. The method of paragraph 112, wherein there is an improvement of classification of at least one level within six months after administration of the rAAV.

[1112] 116. The method of paragraph 112, wherein twelve months post-administration there is an improvement of at least 2 levels in the classifications in any one or more of: the American Heart Association (AH), the American College of Cardiology (ACC), or the New York Heart Association (NYHA), or an equivalent classification system thereof.

[1113] 117. The method of any of paragraphs 112-116, further comprising administering an immune modulator concurrent with, or before, or after the administration of the at least one total dose of a rAAV vector.

[1114] 118. The method of any of paragraphs 112-116, further comprising administering a vasodilator concurrent with, and/or before, and/or after the administration of the at least one total dose of a rAAV vector.

[1115] 119. The method of any of paragraphs 112-118, wherein the subject has non-ischemic heart failure or non-ischemic cardiomyopathy.

[1116] 120. The method of any of paragraphs 112-119, wherein the subject with non-ischemic heart failure or non-ischemic cardiomyopathy is has a congenital cardiomyopathy or a genetic disorder with a cardiac manifestation.

[1117] 121. The method of paragraph 120, wherein the subject with a congenital cardiomyopathy or a genetic disorder with a cardiac manifestation has a disease or disorder selected from the group consisting of: Arrhythmogenic right ventricular cardiomyopathy, Atrial myxoma, familial, Atrial septal defect ostium primum, Atrial septal defect sinus venosus, Barth syndrome, muscular dystrophy, Buerger disease, Cardioencephalomyopathy, Chromosome 1p36 deletion syndrome, Congenital generalized lipodystrophy type 4, Congenital heart block, Dilated cardiomyopathy, Duchenne muscular dystrophy (DMD), Fabry disease, Familial atrial fibrillation, Familial dilated cardiomyopathy, Familial hypertrophic cardiomyopathy, Familial progressive cardiac conduction defect, Familial thoracic aortic aneurysm and aortic dissection, Fibromuscular dysplasia, Friedreich ataxia, Gaucher disease, Glycogen storage disease (types 2, 3 or 4), His bundle tachycardia, Hurler syndrome, Hypoplastic left heart syndrome, Infantile histiocytoid cardiomyopathy, Intracranial arteriovenous malformation, Isobutyryl-CoA dehydrogenase deficiency, Kallikrein hypertension, Kawasaki disease, Kearns-Sayre syndrome, Left ventricular noncompaction, Limb-girdle muscular dystrophy (types 1B, 2E, 2F, 2M, 2C, 2D), Limited systemic sclerosis, Long QT syndrome 1, Lymphedema and cerebral arteriovenous anomaly, Lymphocytic vasculitis, Microcephaly-cardiomyopathy; Mitochondrial encephalomyopathy lactic acidosis and stroke-like episodes, Mitochondrial trifunctional protein deficiency, Myotonic dystrophy type 1, Neonatal stroke, Noonan syndromes 1 -, 2-, 3-, 4-, 5- and 6, Peripartum cardiomyopathy, Peters plus syndrome, PGM1-CDG, PHACE syndrome, Phospholamban Arg 14 Deletion, Postural orthostatic tachycardia syndrome, Primary carnitine deficiency, Progressive familial heart block (types 1A, 1B and 2), Pseudohypoaldosteronism type 2, Pulmonary arterial hypertension, Pulmonary atresia with intact ventricular septum, Pulmonary atresia with ventricular septal defect, Pulmonary valve stenosis, Pulmonary vein stenosis, Pulmonic stenosis, Renoprival hypertension, Retinal arterial macroaneurysm with supravalvular pulmonic stenosis, Right ventricle hypoplasia, Sarcoidosis, Sengers syndrome, Situs inversus, Sudden Arrhythmia Death Syndrome, Supravalvular aortic stenosis, Swyer syndrome, TANGO2-Related Metabolic Encephalopathy and Arrhythmias, TARP syndrome, Tetralogy of Fallot, Timothy syndrome, Tricuspid atresia, Vici syndrome, VLCAD deficiency and Williams syndrome.

[1118] 122. The method of any of paragraphs 111-117, wherein the subject with heart failure is an ischemic cardiomyopathy.

[1119] 123. The method of any of paragraphs 111-120, wherein the subject with heart failure has a cardiovascular disease or heart disease is selected from any of: congestive heart failure (CHF), left ventricular remodeling, peripheral arterial occlusive disease (PAOD), dilated cardiomyopathy (DCM) including idiopathic dilated cardiomyopathy (IDCM), coronary artery disease, ischemia, arrhythmia, myocardial infarction (MI), abnormal heart contractility, acute (decompensated) heart failure (AHF), abnormal Ca2+ metabolism, myocardial ischemia, atherosclerosis, cardiomyopathy, idiopathic cardiomyopathy, genetic disorder induced cardiomyopathy, cardiac arrhythmias, muscular dystrophy, muscle mass abnormality, muscle degeneration, infective myocarditis, drug- or toxin-induced muscle abnormalities, hypersensitivity myocarditis, an autoimmune endocarditis and congenital heart disease and pulmonary heart hypertension.

[1120] 124. The method of any of paragraphs 111-122, wherein the subject has reduced ejaculation fraction (rEFor HFrEF).

[1121] 125. The method of any of paragraphs 111-123, wherein the heart failure comprises ischemia, arrhythmia, myocardial infarction, abnormal heart contractibility, or abnormal Ca2+ metabolism.

[1122] 126. The method of any of paragraphs 111-124, wherein the administration is into the lumen of the coronary artery of the heart of the patient.

[1123] 127. The method of any of paragraphs 111-125, wherein the at least one dose is a total dose-range of about 10¹³ vg to about 10¹⁵ vg., administered in one dose or 2 to 5 sub-doses.

[1124] 128. The method of any of paragraphs 111-126, wherein the total dose is administered as any of the following administration methods: (a) over a period of time of about 20 minutes to about 30 minutes, (b) administered in a series of sub-doses, wherein each sub-dose is administered over a period of time of about 1 minute to about 5 minutes, (c) administered in a series of five sub-doses, each sub-dose is administered over a period of time of about1 minute to about 5 minutes, and wherein the five sub-doses are administered over a period of about 20 minutes to about 30 minutes.

### Definitions and General Points

[1125] While the making and using of various embodiments of the present invention are discussed in detail below, it should be appreciated that the present invention provides many applicable inventive concepts that can be embodied in a wide variety of specific contexts. The specific embodiments discussed herein are merely illustrative of specific ways to make and use the invention and do not delimit the scope of the invention.

[1126] To facilitate the understanding of this invention, a number of terms are defined below. Terms defined herein have meanings as commonly understood by a person of ordinary skill in the areas relevant to the present invention. Terms such as “a”, “an” and “the” are not intended to refer to only a singular entity, but include the general class of which a specific example may be used for illustration. The terminology herein is used to describe specific embodiments of the invention, but their usage does not delimit the invention, except as outlined in the claims.

[1127] The discussion of the background to the invention herein is included to explain the context of the invention. This is not to be taken as an admission that any of the material referred to was published, known, or part of the common general knowledge in any country as of the priority date of any of the claims.

[1128] Throughout this disclosure, various publications, patents and published patent specifications are referenced by an identifying citation. All documents cited in the present specification are hereby incorporated by reference in their entirety. In particular, the teachings or sections of such documents herein specifically referred to are incorporated by reference.

[1129] The practice of the present invention will employ, unless otherwise indicated, conventional techniques of cell biology, cell culture, molecular biology, transgenic biology, microbiology, recombinant DNA, and immunology, which are within the skill of the art. Such techniques are explained fully in the literature. See, for example, Current Protocols in Molecular Biology (Ausubel, 2000, Wiley and son Inc, Library of Congress, USA); Molecular Cloning: A Laboratory Manual, Third Edition, (Sambrook et al, 2001, Cold Spring Harbor, New York: Cold Spring Harbor Laboratory Press); Oligonucleotide Synthesis (M. J. Gait ed., 1984); U.S. Pat. No. 4,683,195; Nucleic Acid Hybridization (Harries and Higgins eds. 1984); Transcription and Translation (Hames and Higgins eds. 1984); Culture of Animal Cells (Freshney, Alan R. Liss, Inc., 1987); Immobilized Cells and Enzymes (IRL Press, 1986); Perbal, A Practical Guide to Molecular Cloning (1984); the series, Methods in Enzymology (Abelson and Simon, eds. -in-chief, Academic Press, Inc., New York), specifically, Vols.154 and 155 (Wu et al. eds.) and Vol. 185, “Gene Expression Technology” (Goeddel, ed.); Gene Transfer Vectors For Mammalian Cells (Miller and Calos eds., 1987, Cold Spring Harbor Laboratory); Immunochemical Methods in Cell and Molecular Biology (Mayer and Walker, eds., Academic Press, London, 1987); Handbook of Experimental Immunology, Vols. I-IV (Weir and Blackwell, eds., 1986); and Manipulating the Mouse Embryo, (Cold Spring Harbor Laboratory Press, Cold Spring Harbor, N.Y., 1986).

[1130] The term “muscle” is well understood by the skilled person. Preferably, the muscle is a skeletal muscle (including the diaphragm) or a heart muscle. The promoters of the present invention can be active in skeletal muscle and/or cardiac muscle. Preferably, the muscle is a muscle of a vertebrate, more preferably of a mammal, even more preferably of a human subject. Preferably, the muscle is a striated muscle.

[1131] In some cases, the promoter is heart specific. As used herein, heart-specific means that the promoter has a preference for cardiac tissue. Such a promoter can also be expressed in other tissues, including other muscles, as long as there is an overall preference for heart cells or heart muscle cells.

[1132] The term “muscle cell” or “myocyte” relates in the present to cells which are found in muscles (muscle tissue) or which are derived from muscle tissue. Muscle cells can be primary cells or a cell line (such as C2C12 or H2K cells (skeletal muscle cell line) or H9C2 cells (cardiac cell line)). The muscle cells can in in vivo (e.g. in muscle tissue) or in vitro (e.g. in cell culture). Myocytes as found in muscle tissue are typically long, tubular cells that develop from myoblasts to form muscles in a process known as myogenesis. The term muscle cells or myocytes as used herein includes myocytes from skeletal muscle and from cardiac muscle (cardiomyocytes). The promoters disclosed herein can be active in skeletal muscle cells and/or cardiac muscle cells.

[1133] The term “cis-regulatory element” or “CRE”, is a term well-known to the skilled person, and means a nucleic acid sequence such as an enhancer, promoter, insulator, or silencer, that can regulate or modulate the transcription of a neighbouring gene (i.e. in cis). CREs are found in the vicinity of the genes that they regulate. CREs typically regulate gene transcription by binding to TFs, i.e. they include TFBS. A single TF may bind to many CREs, and hence control the expression of many genes (pleiotropy). CREs are usually, but not always, located upstream of the transcription start site (TSS) of the gene that they regulate. “Enhancers” in the present context are CREs that enhance (i.e. upregulate) the transcription of genes that they are operably associated with, and can be found upstream, downstream, and even within the introns of the gene that they regulate. Multiple enhancers can act in a coordinated fashion to regulate transcription of one gene. “Silencers” in this context relates to CREs that bind TFs called repressors, which act to prevent or downregulate transcription of a gene. The term “silencer” can also refer to a region in the 3′ untranslated region of messenger RNA, that bind proteins which suppress translation of that mRNA molecule, but this usage is distinct from its use in describing a CRE. Generally, the CREs of the present invention are muscle-specific, cardiac muscle-specific, or skeletal muscle-specific enhancer elements (often referred to as muscle-specific, cardiac muscle-specific, or skeletal muscle-specific CREs, or muscle-specific, cardiac muscle-specific, or skeletal muscle-specific CRE enhancers, or suchlike). In the present context, it is preferred that the CRE is located 2500 nucleotides or less from the transcription start site (TSS), more preferably 2000 nucleotides or less from the TSS, more preferably 1500 nucleotides or less from the TSS, and suitably 1000, 750, 500, 250, 200, 150, or 100 nucleotides or less from the TSS. CREs of the present invention are preferably comparatively short in length, preferably 500 nucleotides or less in length, for example they may be 400, 300, 200, 175, 150, 90, 80, 70, 60 or 50 nucleotides or less in length. The CREs of the present invention are typically provided in combination with an operably linked promoter element, which can be a minimal promoter or proximal promoter; the CREs of the present invention enhance muscle-specific, cardiac muscle-specific, or skeletal muscle-specific activity of the promoter element. In any of the combinations of CREs, or functional variants thereof, disclosed herein, some or all of the recited CREs and promoter elements may suitably be positioned adjacent to one other in the promoter (i.e. without any intervening CREs or other regulatory elements). The CREs may be contiguous or non-contiguous (i.e. they can be positioned immediately adjacent to one another or they can be separated by a spacer or other sequence). The CRE’s may be in any order. In some preferred embodiments, the CREs, or functional variants thereof, are provided in the recited order and are adjacent to one another. For example, the synthetic muscle-specific regulatory nucleic acid may comprise CRE0107 immediately upstream of CRE0033, and so forth. In some embodiments it is preferred that some or all of the CREs are contiguous.

[1134] The term “cis-regulatory module” or “CRM” means a functional regulatory nucleic acid module, which usually comprises two or more CREs; in the present invention the CREs are typically cardiac-specific enhancers, e.g., cardiac muscle-specific or skeletal muscle-specific enhancers, and thus the CRM is a synthetic cardiac-specific regulatory nucleic acid. A CRM may comprise a plurality of cardiac-specific CREs. Suitably, at least one of the CREs comprised in the CRM is a CRE according to SEQ ID NO: 19-24, 27, 28 or a functional variant thereof. Typically, the multiple CREs within the CRM act together (e.g. additively or synergistically) to enhance the transcription of a gene that a promoter comprising the CRM is operably associated with. There is considerable scope to shuffle (i.e. reorder), invert (i.e. reverse orientation), and alter spacing of CREs within a CRM. Accordingly, functional variants of CRMs of the present invention include, inter alia, variants of the referenced CRMs wherein CREs within them have been shuffled and/or inverted, and/or the spacing between CREs has been altered. In the case of a tandem promoter, CRM may be used to describe the combination of promoter element and one or more CREs which are operably linked to a further promoter element. For example, in tandem promoter SP0268, the combination of CRE CRE0035 and promoter element CRE0010 may be considered a CRM.

[1135] As used herein, the phrase “promoter” refers to a region of DNA that generally is located upstream of a nucleic acid sequence to be transcribed that is needed for transcription to occur, i.e. which initiates transcription. Promoters permit the proper activation or repression of transcription of a coding sequence under their control. A promoter typically contains specific sequences that are recognized and bound by plurality of TFs. TFs bind to the promoter sequences and result in the recruitment of RNA polymerase, an enzyme that synthesizes RNA from the coding region of the gene. Many diverse promoters are known in the art. In some cases, the term “promoter” or “composite promoter” is used herein to refer to a combination of a promoter and additional regulatory elements, e.g. regulatory sequences located immediately downstream of the transcription start site (TSS), for example a 5′ UTR and or a 5′UTR and an intron. Such sequences downstream of the TSS can contribute to regulation of expression at the transcriptional and/or translational stages. In some cases, the term “promoter” or “composite promoter” is used herein to refer to a ‘tandem promoter’ as defined elsewhere herein.

[1136] The term “synthetic promoter” as used herein relates to a promoter that does not occur in nature. In the present context it typically comprises a CRE and/or CRM of the present invention operably linked to a minimal (or core) promoter or Cardiac-specific proximal promoter (promoter element). The CREs and/or CRMs of the present invention serve to enhance Cardiac-specific transcription of a gene operably linked to the synthetic promoter. Parts of the synthetic promoter may be naturally occurring (e.g. the minimal promoter or one or more CREs in the promoter), but the synthetic promoter as an entity is not naturally occurring. Alternatively, the synthetic promoter may be a shorter, truncated version of a promoter which occurs in nature.

[1137] As used herein, “minimal promoter” (also known as the “core promoter”) refers to a typically short DNA segment which is inactive or largely inactive by itself, but can mediate transcription when combined with other transcription regulatory elements. Minimal promoter sequences can be derived from various different sources, including prokaryotic and eukaryotic genes. Examples of minimal promoters include the dopamine beta-hydroxylase gene minimum promoter, cytomegalovirus (CMV) immediate early gene minimum promoter (CMV-MP), and the herpes thymidine kinase minimal promoter (MinTK). A minimal promoter typically comprises the transcription start site (TSS) and elements directly upstream, a binding site for RNA polymerase II, and general transcription factor binding sites (often a TATA box). A minimal promoter may also include some elements downstream of the TSS, but these typically have little functionality absent additional regulatory elements.

[1138] As used herein, “proximal promoter” relates to the minimal promoter plus at least some additional regulatory sequence, typically the proximal sequence upstream of the gene that tends to contain primary regulatory elements. It often extends approximately 250 base pairs upstream of the TSS, and includes specific TFBS. A proximal promoter may also include one or more regulatory elements downstream of the TSS, for example a UTR or an intron. In the present case, the proximal promoter may suitably be a shorter, truncated version of naturally occurring Cardiac-specific proximal promoter. The proximal promoters of the present invention may be combined with one or more CREs or CRMs of the present invention. However, the proximal promoter can also be synthetic.

[1139] As used herein, “promoter element” refers to either a minimal promoter or proximal promoter as defined above. In the context of the present invention a promoter element may be combined with one or more CREs in order to provide a synthetic cardiac-specific promoter of the present invention.

[1140] A “functional variant” of a CRE, CRM, promoter element, promoter or other regulatory nucleic acid in the context of the present invention is a variant of a reference sequence that retains the ability to function in the same way as the reference sequence, e.g. as a Cardiac-specific CRE, Cardiac-specific CRM or cardiac-specific promoter. Alternative terms for such functional variants include “biological equivalents” or “equivalents”.

[1141] It will be appreciated that the ability of a given CRE, CRM, promoter or other regulatory sequence to function as a Cardiac-specific enhancer is determined significantly by the ability of the sequence to bind the same Cardiac-specific TFs that bind to the reference sequence. Accordingly, in most cases, a functional variant of a CRE or CRM will contain TFBS for the most or all of same TFs as the reference CRE, CRM or promoter. It is preferred, but not essential, that the TFBS of a functional variant are in the same relative positions (i.e. order and general position) as the reference CRE, CRM or promoter. It is also preferred, but not essential, that the TFBS of a functional variant are in the same orientation as the reference sequence (it will be noted that TFBS can in some cases be present in reverse orientation, e.g. as the reverse complement vis-à-vis the sequence in the reference sequence). It is also preferred, but not essential, that the TFBS of a functional variant are on the same strand as the reference sequence. Thus, in preferred embodiments, the functional variant comprises TFBS for the same TFs, in the same order, the same position, in the same orientation and on the same strand as the reference sequence. It will also be appreciated that the sequences lying between TFBS (referred to in some cases as spacer sequences, or suchlike) are of less consequence to the function of the CRE or CRM. Such sequences can typically be varied considerably, and their lengths can be altered. However, in preferred embodiments the spacing (i.e. the distance between adjacent TFBS) is substantially the same (e.g. it does not vary by more than 20%, preferably by not more than 10%, and more preferably it is approximately the same) in a functional variant as it is in the reference sequence. It will be apparent that in some cases a functional variant of a CRE can be present in the reverse orientation, e.g. it can be the reverse complement of a CRE as described above, or a variant thereof.

[1142] Levels of sequence identity between a functional variant and the reference sequence can also be an indicator or retained functionality. High levels of sequence identity in the TFBS of the CRE, CRM or promoter is of generally higher importance than sequence identity in the spacer sequences (where there is little or no requirement for any conservation of sequence). However, it will be appreciated that even within the TFBS, a considerable degree of sequence variation can be accommodated, given that the sequence of a functional TFBS does not need to exactly match the consensus sequence.

[1143] The ability of one or more TFs to bind to a TFBS in a given functional variant can determined by any relevant means known in the art, including, but not limited to, electromobility shift assays (EMSA), binding assays, chromatin immunoprecipitation (ChIP), and ChIP-sequencing (ChIP-seq). In a preferred embodiment the ability of one or more TFs to bind a given functional variant is determined by EMSA. Methods of performing EMSA are well-known in the art. Suitable approaches are described in Sambrook et al. cited above. Many relevant articles describing this procedure are available, e.g. Hellman and Fried, Nat Protoc. 2007; 2(8): 1849-1861.

[1144] “Muscle-specific” or “Muscle-specific expression” refers to the ability of a cis-regulatory element, cis-regulatory module or promoter to enhance or drive expression of a gene in the muscle (or in muscle-derived cells) in a preferential or predominant manner as compared to other tissues (e.g. spleen, liver,lung, and brain). Expression of the gene can be in the form of mRNA or protein. In preferred embodiments, muscle-specific expression is such that there is negligible expression in other (i.e. non-muscle) tissues or cells, i.e. expression is highly muscle-specific.

[1145] “Cardiac muscle-specific” or “Cardiac muscle-specific expression” refers to the ability of a cis-regulatory element, cis-regulatory module or promoter to enhance or drive expression of a gene in the cardiac muscle in a preferential or predominant manner as compared to other tissues (e.g. spleen, liver, lung, and brain) and compared to the skeletal muscle tissue. Cardiac-specificity can be identified wherein the expression of a gene (e.g. a therapeutic or reporter gene) occurs preferentially or predominantly in muscle cells, including smooth muscle cells in the heart as well as cardiomyocytes. Preferential or predominant expression can be defined, for example, where the level of expression is significantly greater in cardiac-derived cells than in other types of cells (i.e. non-cardiac-derived cells). For example, expression in cardiac-derived cells is suitably at least 5-fold higher than in non-cardiac cells, preferably at least 10-fold higher than in non-cardiac cells, and it may be 50-fold higher or more in some cases. For convenience, muscle-specific expression can suitably be demonstrated via a comparison of expression levels in a hepatic muscle cell line (e.g. muscle-derived cell line such as C2C12 or H2K cells (skeletal muscle) or H9C2 cells (cardiac), compared with expression levels in a liver-derived cell line (e.g. Huh7 or HepG2), kidney-derived cell line (e.g. HEK-293), a cervical tissue-derived cell line (e.g. HeLa) and/or a lung-derived cell line (e.g. A549). Cardiac muscle-specific expression can suitably be demonstrated via a comparison of expression levels in a cardiac muscle cell line (e.g. cardiac muscle derived cell line such as H9C2) or primary cardiomyocyte compared with expression levels in in a liver-derived cell line (e.g. Huh7 or HepG2), a kidney-derived cell line (e.g. HEK-293), a cervical tissue-derived cell line (e.g. HeLa), a lung-derived cell line (e.g. A549) and/or skeletal muscle-derived cells (e.g. C2C12 or H2K). Skeletal muscle-specific expression can suitably be demonstrated via a comparison of expression levels in a skeletal muscle-derived cells (e.g. C2C12 or H2K) or primary skeletal muscle cells compared with expression levels in in a liver-derived cell line (e.g. Huh7 or HepG2), a kidney-derived cell line (e.g. HEK-293), a cervical tissue-derived cell line (e.g. HeLa), a lung-derived cell line (e.g. A549) and/or cardiac muscle cell line (e.g. H9C2).

[1146] The synthetic muscle-specific, cardiac muscle-specific or skeletal muscle-specific promoters of the present invention preferably exhibit reduced expression in non-muscle-derived cells, suitably in Huh7, HEK-293, HeLa, and/or A549 cells when compared to a non-tissue specific promoter such as CMV-IE. The synthetic muscle-specific, cardiac muscle-specific or skeletal muscle-specific promoters of the present invention preferably have an activity of 50% or less than the CMV-IE promoter in non-muscle-derived cells (suitably in Huh7, HEK-293, HeLa, and/or A549 cells), suitably 25% or less, 20% or less, 15% or less, 10% or less, 5% or less or 1% or less. Generally, it is preferred that expression in non-muscle-derived cells is minimized, but in some cases this may not be necessary. Even if a synthetic promoter of the present invention has higher expression in, e.g., one or two non-muscle cells, as long as it generally has higher expression overall in a range of muscle cells versus non-muscle cell, it can still a muscle-specific promoter. In some embodiments, a muscle-specific promoter expresses a gene at least 25%, or at least 35%, or at least 45%, or at least 55%, or at least 65%, or at least 75%, or at least 80%, or at least 85%, or at least 90%, or at least 95%, or any integer between 25%-95% higher in muscle cells as compared to non-muscle cells.

[1147] The synthetic muscle-specific promoters of the present invention are preferably suitable for promoting expression in the muscle of a subject, e.g. driving muscle-specific expression of a transgene, preferably a therapeutic transgene. The synthetic cardiac muscle-specific promoters of the present invention are preferably suitable for promoting expression in the heart of a subject, e.g. driving cardiac muscle-specific expression of a transgene, preferably a therapeutic transgene. The synthetic skeletal muscle-specific promoters of the present invention are preferably suitable for promoting expression in the skeletal muscles of a subject, e.g. driving skeletal muscle-specific expression of a transgene, preferably a therapeutic transgene. Preferred synthetic muscle-specific promoters of the present invention are suitable for promoting muscle-specific transgene expression and have an activity in muscle cells which is at least 15%, 20%, 30%, 40%, 50%, 60%, 70%, 80%, 90%, 100%, 125%, 150%, 175%, 200%, 250%, 300%, 350% or 400% of the activity of the CBA promoter. In some embodiments, the synthetic muscle-specific promoters of the invention are suitable for promoting muscle-specific transgene expression at a level at least 100% of the activity of the CBA promoter, preferably 150%, 200%, 300% or 500% of the activity of the CBA or the spc5-12 promoter. In some embodiments, the synthetic cardiac muscle-specific promoters of the invention are suitable for promoting cardiac muscle-specific transgene expression at a level at least 100% of the activity of the Tnnt2 or My12 promoter, preferably 150%, 200%, 300% or 500% of the activity of the Tnnt2 or My12 promoter. In some embodiments, the synthetic skeletal muscle-specific promoters of the invention are suitable for promoting skeletal muscle-specific transgene expression at a level at least 100% of the activity of the Tnnt2 or My12 promoter, preferably 150%, 200%, 300% or 500% of the activity of the spc5-12 promoter. Such muscle-specific expression is suitably determined in muscle-derived cells, e.g. as C2C12 or H2K cells (skeletal muscle) or H9C2 cells (cardiac) or primary muscle cells (suitably primary human myocytes).

[1148] Synthetic muscle-specific, cardiac muscle-specific or skeletal muscle-specific promoters of the present invention may also be able to promote muscle-specific, cardiac muscle-specific or skeletal muscle-specific expression of a gene at a level at least 50%, 100%, 150% or 200% compared to CMV-IE in muscle-derived cells (e.g. c2c12 or H2K cells (skeletal muscle) or h9C2 cells (cardiac)).

[1149] By “enhancer element” is meant a nucleic acid sequence that, when placed in close proximity to a promoter, confers an increase in transcriptional activity relative to that obtained from the promoter in the absence of an enhancer domain. Thus, an “enhancer” includes a polynucleotide sequence that facilitates transcription of an operably linked gene or coding sequence. A number of enhancers from a variety of different sources are well known in the art. Some polynucleotides with promoter sequences (such as the commonly used CMV promoter) also have enhancer sequences.

[1150] The ability of a CRE, CRM or promoter to function as a cardiac-specific CRE, CRM or promoter can be readily assessed by the skilled person. The skilled person can thus easily determine whether any variant of the specific CRE, CRM or promoter recited above remains functional (i.e. it is a functional variant as defined above). For example, any given CRM to be assessed can be operably linked to a minimal promoter (e.g. positioned upstream of CMV-MP) and the ability of the cis-regulatory element to drive cardiac-specific expression of a gene (typically a reporter gene) is measured. Alternatively, a variant of a CRE or CRM can be substituted into a synthetic cardiac-specific promoter in place of a reference CRE or CRM, and the effects on cardiac-specific expression driven by said modified promoter can be determined and compared to the unmodified form. Similarly, the ability of a promoter to drive cardiac-specific expression can be readily assessed by the skilled person (e.g. as described in the examples below). Expression levels of a gene driven by a variant of a reference promoter can be compared to the expression levels driven by the reference promoter. In some embodiments, where cardiac-specific expression levels driven by a variant promoter are at least 50%, at least 60%, at least 70%, at least 80%, at least 90%, or at least 100% of the expression levels driven by the reference promoter, it can be said that the variant remains functional. Suitable nucleic acid constructs and reporter assays to assess cardiac-specific expression enhancement can be easily constructed, and the examples set out below gives suitable methodologies.

[1151] The ability of a CRE, CRM or promoter to function as a muscle-specific or cardiac muscle-specific CRE, CRM or promoter can be readily assessed by the skilled person. The skilled person can thus easily determine whether any variant of the specific CRE, CRM or promoter recited above remains functional (i.e. it is a functional variant as defined above). For example, any given CRM to be assessed can be operably linked to a minimal promoter (e.g. positioned upstream of CMV-MP) and the ability of the cis-regulatory element to drive muscle-specific or cardiac muscle-specific expression of a gene (typically a reporter gene) is measured. Alternatively, a variant of a CRE can be substituted into a synthetic cardiac muscle-specific promoter in place of a reference CRE, and the effects on cardiac muscle-specific expression driven by said modified promoter can be determined and compared to the unmodified form. Similarly, the ability of a CRM or promoter to drive muscle-specific or cardiac muscle-specific expression can be readily assessed by the skilled person (e.g. as described in the examples below). Expression levels of a gene driven by a variant of a reference promoter can be compared to the expression levels driven by the reference sequence. In some embodiments, where cardiac muscle-specific expression levels driven by a variant promoter are at least 50%, at least 60%, at least 70%, at least 80%, at least 90%, or at least 100% of the expression levels driven by the reference promoter, it can be said that the variant remains functional. Suitable nucleic acid constructs and reporter assays to assess muscle or cardiac muscle-specific expression enhancement can easily constructed.

[1152] Muscle-specificity or cardiac muscle-specificity can be identified wherein the expression of a gene (e.g. a therapeutic or reporter gene) occurs preferentially or predominantly in muscle-derived cells or cardiac muscle derived cells. Preferential or predominant expression can be defined, for example, where the level of expression is significantly greater in muscle-derived or cardiac muscle-derived cells than in other types of cells (i.e. non-muscle-derived or non-cardiac muscle-derived cells). For example, expression in muscle-derived or cardiac muscle-derived cells is suitably at least 5-fold higher than in non-muscle cells, preferably at least 10-fold higher than in non-muscle cells, and it may be 50-fold higher or more in some cases. For convenience, cardiac muscle-specific expression can suitably be demonstrated via a comparison of expression levels in a cardiac muscle cell line (e.g. cardiac muscle derived cell line such as H9C2) or primary cardiomyocyte compared with expression levels in in a liver-derived cell line (e.g. Huh7 or HepG2), a kidney-derived cell line (e.g. HEK-293), a cervical tissue-derived cell line (e.g. HeLa) and/or a lung-derived cell line (e.g. A549). Cardiac muscle-specific expression can suitably be demonstrated via a comparison of expression levels in a cardiac muscle cell line (e.g. cardiac muscle derived cell line such as H9C2) or primary cardiomyocyte compared with expression levels in in a liver-derived cell line (e.g. Huh7 or HepG2), a kidney-derived cell line (e.g. HEK-293), a cervical tissue-derived cell line (e.g. HeLa), a lung-derived cell line (e.g. A549) and/or skeletal muscle-derived cells (e.g. C2C12 or H2K). Skeletal muscle-specific expression can suitably be demonstrated via a comparison of expression levels in a skeletal muscle-derived cells (e.g. C2C12 or H2K) or primary skeletal muscle cells compared with expression levels in in a liver-derived cell line (e.g. Huh7 or HepG2), a kidney-derived cell line (e.g. HEK-293), a cervical tissue-derived cell line (e.g. HeLa), a lung-derived cell line (e.g. A549) and/or cardiac muscle cell line (e.g. H9C2).

[1153] The synthetic cardiac muscle-specific promoters of the present invention preferably exhibit reduced expression in non-muscle-derived cells, suitably in Huh7, HEK-293, HeLa, and/or A549 cells when compared to a non-tissue specific promoter such as CMV-IE. The synthetic cardiac muscle-specific promoters of the present invention preferably have an activity of 50% or less than the CMV-IE promoter in non-muscle-derived cells (suitably in HEK-293, HeLa, and/or A549 cells), suitably 25% or less, 20% or less, 15% or less, 10% or less, 5% or less or 1% or less. Generally, it is preferred that expression in non-muscle-derived cells is minimized, but in some cases this may not be necessary. In some embodiments, the synthetic cardiac muscle-specific promoters of the present invention are suitable for promoting gene expression at a level of at 50% or less than an LP 1 or CMV-IE promoter in non-liver-derived cells (e.g. HEK-293, HeLa, and/or A549 cells). Even if a synthetic promoter of the present invention has higher expression in, e.g., one or two non-cardiac muscle cells, as long as it generally has higher expression overall in a range of cardiac muscle cells versus non-cardiac muscle cell, it can still be considered a cardiac muscle-specific promoter.

[1154] The synthetic cardiac muscle-specific promoters of the present invention are preferably suitable for promoting expression in the heart of a subject, e.g. driving cardiac muscle-specific expression of a transgene, preferably a therapeutic transgene. The synthetic cardiac muscle-specific promoters of the present invention are preferably suitable for promoting expression in the heart of a subject, e.g. driving cardiac muscle-specific expression of a transgene, preferably a therapeutic transgene. The synthetic skeletal muscle-specific promoters of the present invention are preferably suitable for promoting expression in the skeletal muscles of a subject, e.g. driving skeletal muscle-specific expression of a transgene, preferably a therapeutic transgene. Preferred synthetic cardiac muscle-specific promoters of the present invention are suitable for promoting cardiac muscle-specific transgene expression and have an activity in cardiomyocytes which is at least 15%, 20%, 30%, 40%, 50%, 60%, 70%, 80%, 90%, 100%, 125%, 150%, 175%, 200%, 250%, 300%, 350% or 400% of the activity of the CBA promoter or spc5-12 promoter. In some embodiments, the synthetic cardiac muscle-specific promoters of the invention are suitable for promoting cardiac muscle-specific transgene expression at a level at least 50% of the activity of the CBA Tnnt2, My12, or spc5-12 promoter, preferably 100%, 150%, 200%, 300% or 500% of the activity of the CBA, Tnnt2, My12, or the spc5-12 promoter. Such cardiac muscle-specific expression is suitably determined in cardiac muscle-derived cells, e.g. in H9C2 cells or primary cardiomyocytes (suitably primary human cardiomyocytes).

[1155] Synthetic cardiac muscle-specific promoters of the present invention may also be able to promote cardiac muscle-specific expression of a gene at a level at least 50%, 100%, 150% or 200% as compared to CMV-IE in cardiac muscle-derived cells (e.g. H9C2 cardiac cells), or C12C12 or H2K cells (skeletal muscle cells).

[1156] The term “nucleic acid” as used herein typically refers to an oligomer or polymer (preferably a linear polymer) of any length composed essentially of nucleotides. A nucleotide unit commonly includes a heterocyclic base, a sugar group, and at least one, e.g. one, two, or three, phosphate groups, including modified or substituted phosphate groups. Heterocyclic bases may include inter alia purine and pyrimidine bases such as adenine (A), guanine (G), cytosine (C), thymine (T) and uracil (U) which are widespread in naturally-occurring nucleic acids, other naturally-occurring bases (e.g., xanthine, inosine, hypoxanthine) as well as chemically or biochemically modified (e.g., methylated), non-natural or derivatised bases. Sugar groups may include inter alia pentose (pentofuranose) groups such as preferably ribose and/or 2-deoxyribose common in naturally-occurring nucleic acids, or arabinose, 2-deoxyarabinose, threose or hexose sugar groups, as well as modified or substituted sugar groups. Nucleic acids as intended herein may include naturally occurring nucleotides, modified nucleotides or mixtures thereof. A modified nucleotide may include a modified heterocyclic base, a modified sugar moiety, a modified phosphate group or a combination thereof. Modifications of phosphate groups or sugars may be introduced to improve stability, resistance to enzymatic degradation, or some other useful property. The term “nucleic acid” further preferably encompasses DNA, RNA and DNA RNA hybrid molecules, specifically including hnRNA, pre-mRNA, mRNA, cDNA, genomic DNA, amplification products, oligonucleotides, and synthetic (e.g., chemically synthesised) DNA, RNA or DNA RNA hybrids. A nucleic acid can be naturally occurring, e.g., present in or isolated from nature; or can be non-naturally occurring, e.g., recombinant, i.e., produced by recombinant DNA technology, and/or partly or entirely, chemically or biochemically synthesised. A “nucleic acid” can be double-stranded, partly double stranded, or single-stranded. Where single-stranded, the nucleic acid can be the sense strand or the antisense strand. In addition, nucleic acid can be circular or linear.

[1157] By “isolated” is meant, when referring to a nucleic acid is a nucleic acid molecule or a nucleic acid sequence devoid, in whole or part, of sequences normally associated with it in nature; or a sequence, as it exists in nature, but having heterologous sequences in association therewith; or a molecule disassociated from the chromosome.

[1158] The terms “identity” and “identical” and the like refer to the sequence similarity between two polymeric molecules, e.g., between two nucleic acid molecules, such as between two DNA molecules. Sequence alignments and determination of sequence identity can be done, e.g., using the Basic Local Alignment Search Tool (BLAST) originally described by Altschul et al. 1990 (J Mol Biol 215: 403-10), such as the “Blast 2 sequences” algorithm described by Tatusova and Madden 1999 (FEMS Microbiol Lett 174: 247-250).

[1159] Methods for aligning sequences for comparison are well-known in the art. Various programs and alignment algorithms are described in, for example: Smith and Waterman (1981) Adv. Appl. Math. 2:482; Needleman and Wunsch (1970) J. Mol. Biol. 48:443; Pearson and Lipman (1988) Proc. Natl. Acad. Sci. U.S.A. 85:2444; Higgins and Sharp (1988) Gene 73:237-44; Higgins and Sharp (1989) CABIOS 5:151-3; Corpet et al. (1988) Nucleic Acids Res. 16:10881-90; Huang et al. (1992) Comp. Appl. Biosci. 8:155-65; Pearson et al. (1994) Methods Mol. Biol. 24:307-31; Tatiana et al. (1999) FEMS Microbiol. Lett. 174:247-50. A detailed consideration of sequence alignment methods and homology calculations can be found in, e.g., Altschul et al. (1990) J. Mol. Biol. 215:403-10.

[1160] The National Center for Biotechnology Information (NCBI) Basic Local Alignment Search Tool (BLAST™; Altschul et al. (1990)) is available from several sources, including the National Center for Biotechnology Information (Bethesda, MD), and on the internet, for use in connection with several sequence analysis programs. A description of how to determine sequence identity using this program is available on the internet under the “help” section for BLAST™. For comparisons of nucleic acid sequences, the “Blast 2 sequences” function of the BLAST™ (Blastn) program may be employed using the default parameters. Nucleic acid sequences with even greater similarity to the reference sequences will show increasing percentage identity when assessed by this method. Typically, the percentage sequence identity is calculated over the entire length of the sequence.

[1161] For example, a global optimal alignment is suitably found by the Needleman-Wunsch algorithm with the following scoring parameters: Match score: +2, Mismatch score: -3; Gap penalties: gap open 5, gap extension 2. The percentage identity of the resulting optimal global alignment is suitably calculated by the ratio of the number of aligned bases to the total length of the alignment, where the alignment length includes both matches and mismatches, multiplied by 100.

[1162] The term “transcription factor binding site” (TFBS) is well known in the art. It will be apparent to the skilled person that TFBS sequences can be modified, provided that they are bound by the intended transcription factor (TF). Consensus sequences for the various TFBS disclosed herein are known in the art, and the skilled person can readily use this information to determine alternative TFBS. Furthermore, the ability of a TF to bind to a given putative sequence can readily be determined experimentally by the skilled person (e.g. by EMSA and other approaches well known in the art and discussed herein).

[1163] The meaning of “consensus sequence” is well-known in the art. In the present application, the following notation is used for the consensus sequences, unless the context dictates otherwise. Considering the following exemplary DNA sequence:

A[CT]N{A}YR

[1164] A means that an A is always found in that position; [CT] stands for either C or T in that position; N stands for any base in that position; and {A} means any base except A is found in that position. Y represents any pyrimidine, and R indicates any purine.

[1165] The term “synthetic” in the present application means a nucleic acid molecule that does not occur in nature. Synthetic nucleic acids of the present invention are produced artificially, typically by recombinant technologies or de novo synthesis. Such synthetic nucleic acids may contain naturally occurring sequences (e.g. promoter, enhancer, intron, and other such regulatory sequences), but these are present in a non-naturally occurring context. For example, a synthetic gene (or portion of a gene) typically contains one or more nucleic acid sequences that are not contiguous in nature (chimeric sequences), and/or may encompass substitutions, insertions, and deletions and combinations thereof.

[1166] “Complementary” or “complementarity”, as used herein, refers to the Watson-Crick base-pairing of two nucleic acid sequences. For example, for the sequence 5′-AGT-3′ binds to the complementary sequence 3′-TCA-5′. Complementarity between two nucleic acid sequences may be “partial”, in which only some of the bases bind to their complement, or it may be complete as when every base in the sequence binds to its complementary base.

[1167] The term “administration” as used herein refers to introduction of a foreign substance into the human or animal body. Administration can be, for example, intravenous, intraarterial or intracranial.

[1168] “Transfection” in the present application refers broadly to any process of deliberately introducing nucleic acids into cells, and covers introduction of viral and non-viral vectors, and includes or is equivalent to transformation, transduction and like terms and processes. Examples include, but are not limited to: transfection with viral vectors; transformation with plasmid vectors; electroporation (Fromm et al. (1986) Nature 319:791-3); lipofection (Feigner et al. (1987) Proc. Natl. Acad. Sci. USA 84:7413-7); microinjection (Mueller et al. (1978) Cell 15:579-85); Agrobacterium-mediated transfer (Fraley et al. (1983) Proc. Natl. Acad. Sci. USA 80:4803-7); direct DNA uptake; whiskers-mediated transformation; and microprojectile bombardment (Klein et al. (1987) Nature 327:70).

[1169] As used herein, the phrase “transgene” refers to an exogenous nucleic acid sequence. In one example, a transgene is a gene encoding an industrially or pharmaceutically useful compound, or a gene encoding a desirable trait. In yet another example, the transgene encodes useful nucleic acid such as an antisense nucleic acid sequence, wherein expression of the antisense nucleic acid sequence inhibits expression of a target nucleic acid sequence. The transgene preferably encodes a therapeutic product, e.g. a protein.

[1170] The term “vector” is well known in the art, and as used herein refers to a nucleic acid molecule, e.g. double-stranded DNA, which may have inserted into it a nucleic acid sequence according to the present invention. A vector is suitably used to transport an inserted nucleic acid molecule into a suitable host cell. A vector typically contains all of the necessary elements that permit transcribing the insert nucleic acid molecule, and, preferably, translating the transcript into a polypeptide. A vector typically contains all of the necessary elements such that, once the vector is in a host cell, the vector can replicate independently of, or coincidental with, the host chromosomal DNA; several copies of the vector and its inserted nucleic acid molecule may be generated.

[1171] As used herein, the terms “virus vector,” “vector” or “gene delivery vector” refer to a virus (e.g., AAV) particle that functions as a nucleic acid delivery vehicle, and which comprises the vector genome (e.g., viral DNA [vDNA]) packaged within a virion. Alternatively, in some contexts, the term “vector” may be used to refer to the vector genome/vDNA alone.

[1172] An “rAAV vector genome” or “rAAV genome” is an AAV genome (i.e., vDNA) that comprises one or more heterologous nucleic acid sequences. rAAV vectors generally require only the inverted terminal repeat(s) (TR(s)) in cis to generate virus. All other viral sequences are dispensable and may be supplied in trans (Muzyczka, (1992) Curr. Topics Microbial. Immunol. 158:97). Typically, the rAAV vector genome will only retain the one or more TR sequence so as to maximize the size of the transgene that can be efficiently packaged by the vector. The structural and non- structural protein coding sequences may be provided in trans (e.g., from a vector, such as a plasmid, or by stably integrating the sequences into a packaging cell). In embodiments of the invention the rAAV vector genome comprises at least one ITR sequence (e.g., AAV TR sequence), optionally two ITRs (e.g., two AAV TRs), which typically will be at the 5′ and 3′ ends of the vector genome and flank the heterologous nucleic acid, but need not be contiguous thereto. The TRs can be the same or different from each other.

[1173] The term “terminal repeat” or “TR” includes any viral terminal repeat or synthetic sequence that forms a hairpin structure and functions as an inverted terminal repeat (i.e., an ITR that mediates the desired functions such as replication, virus packaging, integration and/or provirus rescue, and the like). The TR can be an AAV TR or a non-AAV TR. For example, a non-AAV TR sequence such as those of other parvoviruses (e.g., canine parvovirus (CPV), mouse parvovirus (MVM), human parvovirus B-19) or any other suitable virus sequence (e.g., the SV40 hairpin that serves as the origin of SV40 replication) can be used as a TR, which can further be modified by truncation, substitution, deletion, insertion and/or addition. Further, the TR can be partially or completely synthetic, such as the “double-D sequence” as described in U.S. Pat. No. 5,478,745 to Samulski et al.

[1174] An “AAV terminal repeat” or “AAV TR,” including an “AAV inverted terminal repeat” or “AAV ITR” may be from any AAV, including but not limited to serotypes 1, 2, 3, 4, 5, 6, 7, 8, 9, 10, 11 or 12 or any other AAV now known or later discovered. An AAV terminal repeat need not have the native terminal repeat sequence (e.g., a native AAV TR or AAV ITR sequence may be altered by insertion, deletion, truncation and/or missense mutations), as long as the terminal repeat mediates the desired functions, e.g., replication, virus packaging, integration, and/or provirus rescue, and the like.

[1175] AAV proteins VP1, VP2 and VP3 are capsid proteins that interact together to form an AAV capsid of an icosahedral symmetry. VP1.5 is an AAV capsid protein described in US Publication No. 2014/0037585.

[1176] The virus vectors of the invention can further be “targeted” virus vectors (e.g., having a directed tropism) and/or a “hybrid” parvovirus (i.e., in which the viral TRs and viral capsid are from different parvoviruses) as described in international patent publication WO 00/28004 and Chao et al., (2000) Molecular Therapy 2:619.

[1177] The virus vectors of the invention can further be duplexed parvovirus particles as described in international patent publication WO 01/92551 (the disclosure of which is incorporated herein by reference in its entirety). Thus, in some embodiments, double stranded (duplex) genomes can be packaged into the virus capsids of the invention.

[1178] Further, the viral capsid or genomic elements can contain other modifications, including insertions, deletions and/or substitutions.

[1179] A “chimeric’ capsid protein as used herein means an AAV capsid protein that has been modified by substitutions in one or more (e.g., 2, 3, 4, 5, 6, 7, 8, 9, 10, etc.) amino acid residues in the amino acid sequence of the capsid protein relative to wild type, as well as insertions and/or deletions of one or more (e.g., 2, 3, 4, 5, 6, 7, 8, 9, 10, etc.) amino acid residues in the amino acid sequence relative to wild type. In some embodiments, complete or partial domains, functional regions, epitopes, etc., from one AAV serotype can replace the corresponding wild type domain, functional region, epitope, etc. of a different AAV serotype, in any combination, to produce a chimeric capsid protein of this invention. Production of a chimeric capsid protein can be carried out according to protocols well known in the art and a significant number of chimeric capsid proteins are described in the literature as well as herein that can be included in the capsid of this invention.

[1180] As used herein, the term “haploid AAV” shall mean that AAV as described in PCT/US18/22725, which is incorporated herein.

[1181] The term a “hybrid” AAV vector or parvovirus refers to a rAAV vector where the viral TRs or ITRs and viral capsid are from different parvoviruses. Hybrid vectors are described in international patent publication WO 00/28004 and Chao et al., (2000) Molecular Therapy 2:619. For example, a hybrid AAV vector typically comprises the adenovirus 5′ and 3′ cis ITR sequences sufficient for adenovirus replication and packaging (i.e., the adenovirus terminal repeats and PAC sequence). In some embodiments, the AAV is a hybrid-AA V2ITR/AA V, as disclosed in U.S. Pat. 7,172,893, which is incorporated herein in its entirety by reference.

[1182] The term “polyploid AAV” refers to a AAV vector which is composed of capsids from two or more AAV serotypes, e.g., and can take advantages from individual serotypes for higher transduction but not in certain embodiments eliminate the tropism from the parents.

[1183] As used herein, a “phosphatase inhibitor-1 protein” or “I-1 protein” is a protein, described, for example, by GenBank Accession No. NM_006741, that regulates cardiac contractility by inhibiting the activity of Protein Phosphatase-1. In the context of the phosphatase inhibitor-1 protein or I-1 protein, the term “wild-type” refers to the nucleotide sequence of SEQ ID NO: 2 encoding Phosphotase Inhibitor Protein-1 (I-1), subunit 1A, and the polypeptide sequence of SEQ ID NO: 1, and any other nucleotide sequence that encodes an I-1 protein (having the same functional properties and binding affinities as the aforementioned polypeptide sequences), such as allelic variants.

[1184] Wild-type I-1 includes so-called “functional derivatives” of the protein. By “functional derivative” is meant a “chemical derivative,” “fragment,” “polymorph” or “variant” of the polypeptide or nucleic acid of the invention. A functional derivative retains at least a portion of the function of the protein, which permits its utility in accordance with the invention. It is well known in the art that, due to the degeneracy of the genetic code, numerous different nucleic acid sequence can code for the same amino acid sequence. It is also well known in the art that conservative changes in amino acid can be made to arrive at a protein or polypeptide that retains the functionality of the original. In both cases, all permutations are intended to be covered by this disclosure.

[1185] Included within the scope of this invention are the functional equivalents of the herein-described isolated nucleic acid molecules. The degeneracy of the genetic code permits substitution of certain codons by other codons that specify the same amino acid and hence would give rise to the same protein. The nucleic acid sequence can vary substantially since, with the exception of methionine and tryptophan, the known amino acids can be coded for by more than one codon. The encoded amino acid sequence thereof would, however, be preserved.

[1186] In addition, the nucleic acid sequence may comprise a nucleotide sequence which results from the addition, deletion or substitution of at least one nucleotide to the 5′-end and/or the 3′-end, provided that its addition, deletion or substitution does not alter the amino acid sequence described herein, which is encoded by the nucleotide sequence. For example, the nucleic acid molecule of the present invention may have restriction endonuclease recognition sites added to its 5′-end and/or 3′-end.

[1187] Further, it is possible to delete codons or to substitute one or more codons with codons other than degenerate codons to produce a structurally modified polypeptide, but one which has substantially the same utility or activity as the polypeptide produced by the unmodified nucleic acid molecule. As recognized in the art, the two polypeptides are functionally equivalent, as are the two nucleic acid molecules that give rise to their production, even though the differences between the nucleic acid molecules are not related to the degeneracy of the genetic code.

[1188] A “chemical derivative” of I-1 contains additional chemical moieties not normally a part of the protein. Covalent modifications of the protein or peptides may be introduced into the molecule by reacting targeted amino acid residues of the peptide with an organic derivatizing agent that is capable of reacting with selected side chains or terminal residues.

[1189] An “angiogenic protein or peptide” as used herein refers to any protein or peptide capable of promoting angiogenesis or angiogenic activity, i.e. blood vessel development.

[1190] The term “angiogenesis” alone or in combination with other agents induces angiogenesis, including but not limited to fibroblast growth factor (FGF), vascular endothelial growth factor (VEGF), Hepatocyte growth factor, angiogenin, transforming growth factor (TGF), tissue necrosis factor (TNF such as TNF-α), platelet-induced growth factor (PDGF), granulocyte colony stimulating factor (GCSF), placenta GF, IL -8, means an agent including angiopoietin such as proliferin, angiopoietin-1 and angiopoietin-2, thrombospondin, ephrin-A 1, E-selectin, leptin, heparin affinity regulatory peptide.

[1191] By “growth factor” is meant an agent that at least promotes cell growth or induces expression changes.

[1192] “Vasculature” or “vascular” are terms referring to the system of vessels carrying blood (as well as lymph fluids) throughout the mammalian body.

[1193] “Blood vessel” refers to any of the vessels of the mammalian vascular system, including arteries, arterioles, capillaries, venules, veins, sinuses, and vasa vasorum. In preferred aspects of the present invention for treating a cardiovascular condition, heart disease, vectors comprising angiogenic transgenes are introduced directly into vascular conduits supplying blood to the myocardium. Such vascular conduits include the coronary arteries as well as vessels such as saphenous veins or internal mammary artery grafts.

[1194] “Artery” refers to a blood vessel through which blood passes away from the heart. Coronary arteries supply the tissues of the heart itself, while other arteries supply the remaining organs of the body. The general structure of an artery consists of a lumen surrounded by a multi-layered arterial wall.

[1195] The term “fragment” is used to indicate a polypeptide derived from the amino acid sequence of I-1 having a length less than the full-length polypeptide from which it has been derived. Such a fragment may, for example, be produced by proteolytic cleavage of the full-length protein. Such a fragment may also be obtained recombinantly by appropriately modifying the DNA sequence encoding the proteins to delete one or more amino acids at one or more sites of the C-terminus, N-terminus, and/or within the native sequence. Such fragments retain the functional portion of the native I-1.

[1196] Another functional derivative intended to be within the scope of the present invention is a “variant” polypeptide, which either lacks one or more amino acids or contains additional or substituted amino acids relative to the native polypeptide. Such variants having added, substituted and/or additional amino acids retain the functional portion of the native I-1. A functional derivative of a protein with deleted, inserted and/or substituted amino acid residues may be prepared using standard techniques well-known to those of ordinary skill in the art (for example, using site-directed mutagenesis (Adelman et al., 1983, DNA 2:183). Alternatively, proteins with amino acid deletions, insertions and/or substitutions may be conveniently prepared by direct chemical synthesis, using methods well-known in the art.

[1197] As used herein, the term “mutant” refers to an I-1 polypeptide translated from a gene containing a genetic mutation that results in an amino acid sequence that is altered in comparison to the wild-type sequence and results in an altered function of the I-1 polypeptide.

[1198] As used herein, the term “phosphatase activity” refers to the activity of phosphatase on the commonly used model protein substrate, MyBP. Herein, Myelin Basic Protein (MyBP) is employed (labeled with 32P) as a substrate (binding partner) in measuring change in protein phosphatase activity.

[1199] The term “operably linked”, “operably connected” or equivalent expressions as used herein refer to the arrangement of various nucleic acid elements relative to each other such that the elements are functionally connected and are able to interact with each other in the manner intended. Such elements may include, without limitation, a promoter, a CRE (e.g. enhancer or other regulatory element), a promoter element, a polyadenylation sequence, one or more introns and/or exons, and a coding sequence of a gene of interest to be expressed. The nucleic acid sequence elements, when properly oriented or operably linked, act together to modulate the activity of one another, and ultimately may affect the level of expression of an expression product. By modulate is meant increasing, decreasing, or maintaining the level of activity of a particular element. The position of each element relative to other elements may be expressed in terms of the 5′ terminus and the 3′ terminus of each element or their position upstream or downstream of another element or position (such as a TSS or promoter element), and the distance between any particular elements may be referenced by the number of intervening nucleotides, or base pairs, between the elements. As understood by the skilled person, operably linked implies functional activity, and is not necessarily related to a natural positional link. Indeed, when used in nucleic acid expression cassettes, CREs will typically be located immediately upstream of the promoter element (although this is generally the case, it should definitely not be interpreted as a limitation or exclusion of positions within the nucleic acid expression cassette), but this needs not be the case in vivo, e.g., a regulatory element sequence naturally occurring downstream of a gene whose transcription it affects is able to function in the same way when located upstream of the promoter. Hence, according to a specific embodiment, the regulatory or enhancing effect of the regulatory element can be position- independent.

[1200] A “spacer sequence” or “spacer” as used herein is a nucleic acid sequence that separates two functional nucleic acid sequences (e.g. TFBS, CREs, CRMs, promoter element, etc.). It can have essentially any sequence, provided it does not prevent the functional nucleic acid sequence (e.g. cis-regulatory element) from functioning as desired (e.g. this could happen if it includes a silencer sequence, prevents binding of the desired transcription factor, or suchlike). Typically, it is non-functional, as in it is present only to space adjacent functional nucleic acid sequences from one another. In some embodiments, spacers may have a length of 75, 50, 40, 30, 30 or 10 nucleotides or fewer. In some embodiments, spacers may have a length of greater than 75 nucleotides, e.g., 75-100, 100-200, 200-250, 250-300, or greater than 300 nucleotides.

[1201] The term “pharmaceutically acceptable” as used herein is consistent with the art and means compatible with the other ingredients of the pharmaceutical composition and not deleterious to the recipient thereof.

[1202] The phrase a “therapeutically effective amount” and like phrases mean a dose or plasma concentration in a subject that provides the desired specific pharmacological effect, e.g. to express a therapeutic gene in cardiac tissue or the heart, and/or secretion into the plasma. It is emphasized that a therapeutically effective amount may not always be effective in treating the conditions described herein, even though such dosage is deemed to be a therapeutically effective amount by those of skill in the art. The therapeutically effective amount may vary based on the route of administration and dosage form, the age and weight of the subject, and/or the disease or condition being treated. A therapeutically effective amount may not always be effective in treating the conditions described herein, even though such dosage is deemed to be a therapeutically effective amount by those of skill in the art.

[1203] By the terms “treat,” “treating” or “treatment of (and grammatical variations thereof) it is meant that the severity of the subject’s condition is reduced, at least partially improved or stabilized and/or that some alleviation, mitigation, decrease or stabilization in at least one clinical symptom is achieved and/or there is a delay in the progression of the disease or disorder.

[1204] The terms “prevent,” “preventing” and “prevention” (and grammatical variations thereof) refer to prevention and/or delay of the onset of a disease, disorder and/or a clinical symptom(s) in a subject and/or a reduction in the severity of the onset of the disease, disorder and/or clinical symptom(s) relative to what would occur in the absence of the methods of the invention. The prevention can be complete, e.g., the total absence of the disease, disorder and/or clinical symptom(s). The prevention can also be partial, such that the occurrence of the disease, disorder and/or clinical symptom(s) in the subject and/or the severity of onset is substantially less than what would occur in the absence of the present invention.

[1205] A “treatment effective” amount as used herein is an amount that is sufficient to provide some improvement or benefit to the subject. Alternatively stated, a “treatment effective” amount is an amount that will provide some alleviation, mitigation, decrease or stabilization in at least one clinical symptom in the subject. Those skilled in the art will appreciate that the therapeutic effects need not be complete or curative, as long as some benefit is provided to the subject.

[1206] A “prevention effective” amount as used herein is an amount that is sufficient to prevent and/or delay the onset of a disease, disorder and/or clinical symptoms in a subject and/or to reduce and/or delay the severity of the onset of a disease, disorder and/or clinical symptoms in a subject relative to what would occur in the absence of the methods of the invention. Those skilled in the art will appreciate that the level of prevention need not be complete, as long as some preventative benefit is provided to the subject.

[1207] As used herein, the term “heart disorder” refers to a structural or functional abnormality of the heart that impairs its normal functioning. For example, the heart disorder can be heart failure, ischemia, myocardial infarction, congestive heart failure (CHF), arrhythmia, cardiomyopathy, defect in cardiac contractility, transplant rejection and the like. The term includes disorders characterized by abnormalities of contraction, abnormalities in Ca2+ metabolism, and disorders characterized by arrhythmia.

[1208] The term “Heart disease” refers to acute and/or chronic cardiac dysfunctions. Heart disease is often associated with a decrease in cardiac contractile function and may be associated with an observable decrease in blood flow to the myocardium (e.g., as a result of coronary artery disease). Manifestations of heart disease include myocardial ischemia, which may result in angina, heart attack and/or congestive heart failure. The term relates to a disease amenable to treatment and/or prevention by administration of an active compound to the heart, in particular to cardiac cells or cardiomyocytes. In some embodiments, the heart disorder is heart failure, or congestive heart failure (CHF).

[1209] The term “cardiomyopathies” refers to a group of diseases giving rise to congestive heart failure. Cardiomyopathies are a heterogeneous group of diseases of the myocardium associated with mechanical and/or electrical dysfunction that usually exhibit inappropriate ventricular hypertrophy or dilatation and are due to a variety of causes, including genetic causes.

[1210] As used herein, the term “cardiomyopathy” refers to a deterioration of function of the myocardium (i.e., heart muscle). Cardiomyopathy can be extrinsic (e.g., wherein the primary pathology resides outside of the myocardium itself, for example, caused by ischemia) or intrinsic (e.g., wherein the weakness in the heart muscle is not due to an identifiable external cause).

[1211] The term “congestive heart failure” or “CHF” is also interchangeably with “heart failure” or “chronic heart failure” is a manifestation of pathological conditions affecting the heart, and refers to the inability of the heart to pump blood at an adequate rate to meet the metabolic demands of the body.

[1212] The term “heart failure” is clinically defined as a condition in which the heart does not provide adequate blood flow to the body to meet metabolic demands. Symptoms include breathlessness, fatigue, weakness, leg swelling, and exercise intolerance. On physical examination, patients with heart failure tend to have elevations in heart and respiratory rates, rales (an indication of fluid in the lungs), edema, jugular venous distension, and, in many cases, enlarged hearts. Patients with severe heart failure suffer a high mortality; typically 50% of the patients die within two years of developing the condition. In some cases, heart failure is associated with severe coronary artery disease (“CAD”), typically resulting in myocardial infarction and either progressive chronic heart failure or an acute low output state, as described herein and in the art. In other cases, heart failure is associated with dilated cardiomyopathy without associated severe coronary artery disease. Stated differently, the term “heart failure” refers to any of a number of disorders in which the heart has a defect in its ability to pump adequately to meet the body’s needs. In many cases, heart failure is the result of one or more abnormalities at the cellular level in the various steps of excitation-contraction coupling of the cardiac cells. One such abnormality is a defect in SR function. Heart failure is most frequently due to a defect in myocardial contraction, which can occur for many reasons, the most common of which include: ischemic damage to the myocardium, excessive mechanical resistance to the outflow of blood from the heart, overloading of the cardiac chambers due to defective valve function, infection or inflammation of the myocardium, or congenitally poor myocardial contractile function. (Braunwald, E. 2001 Harrison’s Principles of Internal Medicine, 15th ed., pp1318-29).

[1213] The term “peripheral vascular disease” refers to acute or chronic dysfunction of the peripheral (i.e., non-cardiac) vasculature and/or the tissues supplied thereby. As with heart disease, peripheral vascular disease typically results from an inadequate blood flow to the tissues supplied by the vasculature, which lack of blood may result, for example, in ischemia or, in severe cases, in tissue cell death. Aspects of peripheral vascular disease include, without limitation, peripheral arterial occlusive disease (PAOD) and peripheral muscle ischemia. Frequently, symptoms of peripheral vascular disease are manifested in the extremities of the patient, especially the legs.

[1214] The term “cardiovascular conditions” include, but are not limited to, coronary artery disease / ischemia, coronary artery disease (CAD), ischemia, angina (chest pain), thrombosis, coronary thrombosis, myocardial infarction (MI), none Symptom ischemia, stenosis / restenosis, transient cerebral ischemic attack (TIA), atherosclerosis, peripheral vascular disease such as bradyarrhythmia, bradycardia, sick sinus rhythm (sinus dysfunction syndrome), Sinus bradycardia, sinoatrial block, asystole, sinus arrest, syncope, first degree atrial-ventricular (AV) block, second degree atrial-ventricular (AV) block, third degree atrial-ventricular (AV) block, abnormal Bradyarrhythmias that are dysfunctional, such as tachyarrhythmia, tachycardia, fibrillation, flutter, atrial fibrillation, atrial flutter, familial atrial fibrillation, paroxysmal atrial fibrillation, permanent atrial fibrillation, Persistent atrial fibrillation, upper ventricular tachyarrhythmia, sinus tachycardia, reentry (reentrant arrhythmia), AV connection Reentry, focal arrhythmia, translocation, ventricular fibrillation (VF), ventricular tachycardia (VT), Wolf Parkinson-White syndrome (WPW), sudden cardiac death, tachyarrhythmia such as heart failure, cardiomyopathy, congestion Heart failure, hypertrophic cardiomyopathy, remodeling, non-ischemic cardiomyopathy, diastolic cardiomyopathy, restrictive cardiomyopathy, diastolic heart failure, systolic heart failure, heart failure that is chronic heart failure, e.g. atrial ventricular (AV) blockade, bundle Branch block (BBB), left bundle branch block (LBBB), right bundle branch block (RBBB), long-term QT syndrome (LQTS), premature ventricular contraction (PVC), electrical remodeling, intraventricular conduction deficit, hemiblock Certain heart blocks / electrical disorders, such as hypertension, hypotension, left ventricular dysfunction, low ejection fraction, low cardiac output, low cardiac output hemodynamic deficiency, sudden cardiac death, cardiac arrest Suddenly heart (SCD), ventricular fibrillation, pump failure, bacterial endocarditis, viral myocarditis, pericarditis, rheumatic heart disease, there is syncope. Specifically, cardiovascular conditions include, but are not limited to, arrhythmias that are hyperplasias not associated with, for example, atrial fibrillation, ventricular fibrillation or bradycardia, ischemia, heart failure, neoplastic disease,, Ventricular remodeling, diastolic dysfunction, abnormal body temperature, such as altered vein, left ventricle, or left atrial pressure, abnormal or changing pressure, abnormal or changing heartbeat or heart sound, abnormal or changing electrogram, e.g.,changing blood pH, glucose, pO 2, pCO 2, minute ventilation, creatine, CRP, MEF2A, creatine kinase or creatine kinase MB level abnormal or altered cardiac metabolism, abnormal or altered pulmonary impedance or thoracic impedance, abnormal or altered Stroke output, abnormal or altered neurohormonal levels, abnormal or altered electrical activity, abnormal or altered Sensitive nerve activity, abnormal or altered renal output, abnormal or altered filtration rate, may be associated with such abnormal or altered angiotensin II levels, or abnormal or altered breathing sounds.

[1215] The term “Myocardial ischemia” or “MI” is a condition in which the heart muscle does not receive adequate levels of oxygen and nutrients, which is typically due to inadequate blood supply to the myocardium (e.g., as a result of coronary artery disease).

[1216] The terms “coronary artery disease” and “acute coronary syndrome” as used interchangeably herein, and refer to myocardial infarction refer to a cardiovascular condition, disease or disorder, include all disorders characterized by insufficient, undesired or abnormal cardiac function, e.g. ischemic heart disease, hypertensive heart disease and pulmonary hypertensive heart disease, valvular disease, congenital heart disease and any condition which leads to congestive heart failure in a subject, particularly a human subject. Insufficient or abnormal cardiac function can be the result of disease, injury and/or aging. By way of background, a response to myocardial injury follows a well-defined path in which some cells die while others enter a state of hibernation where they are not yet dead but are dysfunctional. This is followed by infiltration of inflammatory cells, deposition of collagen as part of scarring, all of which happen in parallel with in-growth of new blood vessels and a degree of continued cell death.

[1217] As used herein, the term “ischemia” refers to any localized tissue ischemia due to reduction of the inflow of blood. The term “myocardial ischemia” refers to circulatory disturbances caused by coronary atherosclerosis and/or inadequate oxygen supply to the myocardium. For example, an acute myocardial infarction represents an irreversible ischemic insult to myocardial tissue. This insult results in an occlusive (e.g., thrombotic or embolic) event in the coronary circulation and produces an environment in which the myocardial metabolic demands exceed the supply of oxygen to the myocardial tissue.

[1218] As used herein, the term “heart cell” refers to a cell which can be: (a) part of a heart present in a subject, (b) part of a heart which is maintained in vitro, (c) part of a heart tissue, or (d) a cell which is isolated from the heart of a subject. For example, the cell can be a muscle cell, such as a cardiac myocyte (cardiomyocyte) or smooth muscle cell. Heart cells of the invention can also include endothelial cells within the heart, for example, cells of a capillary, artery, or other vessel. A heart cell includes pacemaker cells and the like.

[1219] As used herein, the term “heart” refers to a heart present in a subject or to a heart which is maintained, ex vivo outside a subject.

[1220] As used herein, the term “heart tissue” refers to tissue which is derived from the heart of a subject.

[1221] As used herein, the term “contractility” (as in myocardial contractility) refers to the performance of cardiac muscle. It is often defined as: the intrinsic ability of a cardiac muscle fiber to contract at a given fiber length.

[1222] As used herein, the term “restricting blood flow” refers to substantially blocking the flow of blood through a vessel, e.g., flow of blood into the distal aorta and its branches. For example, at least 50% of the blood flowing out of the heart is restricted, preferably 75% and more preferably 80, 90, or 100% of the blood is restricted from flowing out of the heart. The blood flow can be restricted by obstructing the aorta and the pulmonary artery, e.g., with clamps.

[1223] The term “AAV vector” as used herein is well known in the art, and generally refers to an AAV vector nucleic acid sequence including various nucleic acid sequences. An AAV vector as used herein typically comprise a heterologous nucleic acid sequence not of AAV origin as part of the vector. This heterologous nucleic acid sequence typically comprises a promoter as disclosed herein as well as other sequences of interest for the genetic transformation of a cell. In general, the heterologous nucleic acid sequence is flanked by at least one, and generally by two AAV inverted terminal repeat sequences (ITRs). An “AAV virion” or “AAV virus” or “AAV viral particle” or “AAV vector particle” refers to a viral particle composed of at least one AAV capsid polypeptide (including both variant AAV capsid polypeptides and non-variant parent capsid polypeptides) and an encapsidated polynucleotide AAV vector. If the particle comprises a heterologous nucleic acid (i.e. a polynucleotide other than a wild-type AAV genome, such as a transgene to be delivered to a mammalian cell), it can be referred to as an “AAV vector particle” or simply an “AAV vector”. Thus, production of AAV virion or AAV particle necessarily includes production of AAV vector as such a vector is contained within an AAV virion or AAV particle. The ITRs may be derived from the same serotype as the capsid, selected from any of the serotypes listed in Table 11, or may be from a different serotype than the capsid. The two ITRs do not have to be the same. In addition, synthetic ITRs can be used. The AAV vector typically has more than one ITR. In a non-limiting example, the AAV vector has a viral genome comprising two ITRs. In one embodiment, the ITRs are of the same serotype as one another. In some embodiments, the ITRs are of different serotypes. Non-limiting examples include zero, one or both of the ITRs having the same serotype as the capsid. Independently, each ITR may be about 100 to about 150 nucleotides in length. An ITR may be about 100-105 nucleotides in length, 106-110 nucleotides in length, 111 -115 nucleotides in length, 116-120 nucleotides in length, 121 -125 nucleotides in length, 126-130 nucleotides in length, 131 -135 nucleotides in length, 136-140 nucleotides in length, 141-145 nucleotides in length or 146-150 nucleotides in length. In one embodiment, the ITRs are 140-142 nucleotides in length. Non-limiting examples of ITR length are 102, 105, 130, 140, 141, 142, 145 nucleotides in length.

[1224] As used herein, the term “microRNA” refers to any type of interfering RNAs, including but not limited to, endogenous microRNAs and artificial microRNAs (e.g., synthetic miRNAs). Endogenous microRNAs are small RNAs naturally encoded in the genome capable of modulating the productive utilization of mRNA. An artificial microRNA can be any type of RNA sequence, other than endogenous microRNA, capable of modulating the activity of an mRNA. A microRNA sequence can be an RNA molecule composed of any one or more of these sequences. MicroRNA (or “miRNA”) sequences have been described in publications such as Lim, et al, 2003, Genes & Development, 17, 991-1008, Lim et al, 2003, Science, 299, 1540, Lee and Ambrose, 2001, Science, 294, 862, Lau et al, 2001, Science 294, 858-861, Lagos -Quintana et al, 2002, Current Biology, 12, 735-739, Lagos- Quintana et al., 2001, Science, 294, 853-857, and Lagos-Quintana et al., 2003, RNA, 9, 175- 179. Examples of microRNAs include any RNA fragment of a larger RNA or is a miRNA, siRNA, stRNA, sncRNA, tncRNA, snoRNA, smRNA, shRNA, snRNA, or other small non-coding RNA. See, e.g., U.S. Pat. Applications 20050272923, 20050266552, 20050142581, and 20050075492. A “microRNA precursor” (or “pre-miRNA”) refers to a nucleic acid having a stem-loop structure with a microRNA sequence incorporated therein. A “mature microRNA” (or “mature miRNA”) includes a microRNA cleaved from a microRNA precursor (a “pre-miRNA”), or synthesized (e.g., synthesized in a laboratory by cell-free synthesis), and has a length of from about 19 nucleotides to about 27 nucleotides, e.g., a mature microRNA can have a length of 19 nt, 20 nt, 21 nt, 22 nt, 23 nt, 24 nt, 25 nt, 26 nt, or 27 nt. A mature microRNA can bind to a target mRNA and inhibit translation of the target mRNA.

[1225] The terms “treatment” or “treating” refer to reducing, ameliorating or eliminating one or more signs, symptoms, or effects of a disease or condition. “Treatment,” as used herein thus includes any treatment of a disease in a mammal, particularly in a human, and includes: (a) preventing the disease from occurring in a subject predisposed to the disease or at risk of acquiring the disease but has not yet been diagnosed as having it; (b) inhibiting the disease, i.e., arresting its development; and (c) relieving the disease, i.e., causing regression of the disease.

[1226] In some embodiments, the terms “treat” or “treatment” or “treating” refers to therapeutic treatment, wherein the object is to prevent or slow the development of the disease, such as slow down the development of a cardiac disorder, or reducing at least one adverse effect or symptom of a cardiovascular condition, disease or disorder, i.e., any disorder characterized by insufficient or undesired cardiac function. Adverse effects or symptoms of cardiac disorders are well-known in the art and include, but are not limited to, dyspnea, chest pain, palpitations, dizziness, syncope, edema, cyanosis, pallor, fatigue and death. Treatment is generally “effective” if one or more symptoms or clinical markers are reduced as that term is defined herein. Alternatively, a treatment is “effective” if the progression of a disease is reduced or halted. That is, “treatment” includes not just the improvement of symptoms or decrease of markers of the disease, but also a cessation or slowing of progress or worsening of a symptom that would be expected in absence of treatment. Beneficial or desired clinical results include, but are not limited to, alleviation of one or more symptom(s), diminishment of extent of disease, stabilized (i.e., not worsening) state of disease, delay or slowing of disease progression, amelioration or palliation of the disease state, and remission (whether partial or total), whether detectable or undetectable. “Treatment” can also mean prolonging survival as compared to expected survival if not receiving treatment. Those in need of treatment include those already diagnosed with a cardiac condition, as well as those likely to develop a cardiac condition due to genetic susceptibility or other factors such as weight, diet and health. In some embodiments, the term to treat also encompasses preventative measures and/or prophylactic treatment, which includes administering a pharmaceutical composition as disclosed herein to prevent the onset of a disease or disorder.

[1227] The term “effective amount” as used herein refers to the amount of therapeutic agent of pharmaceutical composition, e.g., an amount of the synthetic modified RNA to express sufficient amount of the protein to reduce at least one or more symptom(s) of the disease or disorder, and relates to a sufficient amount of pharmacological composition to provide the desired effect. The phrase “therapeutically effective amount” as used herein, e.g., of a synthetic modified RNA as disclosed herein means a sufficient amount of the composition to treat a disorder, at a reasonable benefit/risk ratio applicable to any medical treatment. The term “therapeutically effective amount” therefore refers to an amount of the composition as disclosed herein that is sufficient to, for example, effect a therapeutically or prophylactically significant reduction in a symptom or clinical marker associated with a cardiac dysfunction or disorder when administered to a typical subject who has a cardiovascular condition, disease or disorder.

[1228] A therapeutically significant reduction in a symptom is, e.g. at least about 10%, at least about 20%, at least about 30%, at least about 40%, at least about 50%, at least about 60%, at least about 70%, at least about 80%, at least about 90%, at least about 100%, at least about 125%, at least about 150% or more in a measured parameter as compared to a control or non-treated subject. Measured or measurable parameters include clinically detectable markers of disease, for example, elevated or depressed levels of a biological marker, as well as parameters related to a clinically accepted scale of symptoms or markers for a disease or disorder. It will be understood, that the total daily usage of the compositions and formulations as disclosed herein will be decided by the attending physician within the scope of sound medical judgment. The exact amount required will vary depending on factors such as the type of disease being treated.

[1229] With reference to the treatment of, for example, a cardiovascular condition or disease in a subject, the term “therapeutically effective amount” refers to the amount that is safe and sufficient to prevent or delay the development or a cardiovascular disease or disorder. The amount can thus cure or cause the cardiovascular disease or disorder to go into remission, slow the course of cardiovascular disease progression, slow or inhibit a symptom of a cardiovascular disease or disorder, slow or inhibit the establishment of secondary symptoms of a cardiovascular disease or disorder or inhibit the development of a secondary symptom of a cardiovascular disease or disorder. The effective amount for the treatment of the cardiovascular disease or disorder depends on the type of cardiovascular disease to be treated, the severity of the symptoms, the subject being treated, the age and general condition of the subject, the mode of administration and so forth. Thus, it is not possible to specify the exact “effective amount”. However, for any given case, an appropriate “effective amount” can be determined by one of ordinary skill in the art using only routine experimentation. The efficacy of treatment can be judged by an ordinarily skilled practitioner, for example, efficacy can be assessed in animal models of a cardiovascular disease or disorder as discussed herein, for example treatment of a rodent with acute myocardial infarction or ischemia-reperfusion injury, and any treatment or administration of the compositions or formulations that leads to a decrease of at least one symptom of the cardiovascular disease or disorder as disclosed herein, for example, increased heart ejection fraction, decreased rate of heart failure, decreased infarct size, decreased associated morbidity (pulmonary edema, renal failure, arrhythmias) improved exercise tolerance or other quality of life measures, and decreased mortality indicates effective treatment. In embodiments where the compositions are used for the treatment of a cardiovascular disease or disorder, the efficacy of the composition can be judged using an experimental animal model of cardiovascular disease, e.g., animal models of ischemia-reperfusion injury (Headrick JP, Am J Physiol Heart circ Physiol 285;H1797;2003 ) and animal models acute myocardial infarction. (Yang Z, Am J Physiol Heart Circ. Physiol 282:H949:2002; Guo Y, J Mol Cell Cardiol 33;825-830, 2001), or models of heart failure (disclosed in Mann, Douglas L., and G. Michael Felker. “Mechanisms and models in heart failure: a translational approach.” Circulation research 128.10 (2021): 1435-1450), e.g., α-actin transgenic mice (mActin-Tg mice) which is a model of cardiomyopathy.

[1230] When using an experimental animal model, efficacy of treatment is evidenced when a reduction in a symptom of the cardiovascular disease or disorder, for example, a reduction in one or more symptom of dyspnea, chest pain, palpitations, dizziness, syncope, edema, cyanosis, pallor, fatigue and high blood pressure which occurs earlier in treated, versus untreated animals. By “earlier” is meant that a decrease, for example in the size of the tumor occurs at least 5% earlier, but preferably more, e.g., one day earlier, two days earlier, 3 days earlier, or more.

[1231] As used herein, the term “treating” when used in reference to a treatment of a cardiovascular disease or disorder is used to refer to the reduction of a symptom and/or a biochemical marker of a cardiovascular disease or disorder, for example a reduction in at least one biochemical marker of a cardiovascular disease by at least about 10% would be considered an effective treatment. Examples of such biochemical markers of cardiovascular disease include a reduction of, for example, creatine phosphokinase (CPK), aspartate aminotransferase (AST), lactate dehydrogenase (LDH) in the blood, and/or a decrease in a symptom of cardiovascular disease and/or an improvement in blood flow and cardiac function as determined by someone of ordinary skill in the art as measured by electrocardiogram (ECG or EKG), or echocardiogram (heart ultrasound), Doppler ultrasound and nuclear medicine imaging. A reduction in a symptom of a cardiovascular disease by at least about 10% would also be considered effective treatment by the methods as disclosed herein. As alternative examples, a reduction in a symptom of cardiovascular disease, for example a reduction of at least one of the following; dyspnea, chest pain, palpitations, dizziness, syncope, edema, cyanosis etc. by at least about 10% or a cessation of such systems, or a reduction in the size one such symptom of a cardiovascular disease by at least about 10% would also be considered as affective treatments by the methods as disclosed herein. In some embodiments, it is preferred, but not required that the therapeutic agent actually eliminate the cardiovascular disease or disorder, rather just reduce a symptom to a manageable extent.

[1232] As used herein, the terms “having therapeutic effect” and “successful treatment” carry essentially the same meaning. In particular, a patient suffering from a cardiovascular disease, or heart disease is successfully “treated” for the condition if the patient shows observable and/or measurable reduction in or absence of one or more of the symptoms of heart disease after receiving a rAAV vector as disclosed herein according to the methods of the present invention. Reduction of these signs or symptoms may also be felt by the patient. Thus, indicators of successful treatment of heart disease conditions include the patient showing or feeling a reduction in any one of the symptoms of angina pectoris, fatigue, weakness, breathlessness, leg swelling, rales, heart or respiratory rates, edema or jugular venous distension. The patient may also show greater exercise tolerance, have a smaller heart with improved ventricular and cardiac function, and in general, require fewer hospital visits related to the heart condition. The improvement in cardiovascular function may be adequate to meet the metabolic needs of the patient and the patient may not exhibit symptoms under mild exertion or at rest. Many of these signs and symptoms are readily observable by eye and/or measurable by routine procedures familiar to a physician. Indicators of improved cardiovascular function include increased blood flow and/or contractile function in the treated tissues. As described below, blood flow in a patient can be measured by thallium imaging (as described by Braunwald in Heart Disease, 4th ed., pp. 276-311 (Saunders, Philadelphia, 1992)) or by echocardiography (described in Examples 1 and 5 and in Sahn, D J., et al., Circulation. 58:1072-1083, 1978). Blood flow before and after treatment with the rAAV vector as disclosed herein according to the administration methods disclosed herein can be compared using these methods. Improved heart function is associated with decreased signs and symptoms, as noted above. In addition to echocardiography, one can measure ejection fraction (LV) by nuclear (non-invasive) techniques as is known in the art. Blood flow and contractile function can likewise be measured in peripheral tissues treated according to the present invention.

[1233] The “administration” of an agent to a subject includes any route of introducing or delivering to a subject the agent to perform its intended function. Administration can be carried out by any suitable route, including orally, intranasally, intraocularly, ophthalmically, parenterally (intravascularly, intramuscularly, intraperitoneally, or subcutaneously), or topically. Administration includes self-administration and the administration by another. Intravenous or intraarterial administration is of particular interest in the present invention.

[1234] The terms “individual,” “subject,” and “patient” are used interchangeably, and refer to any individual subject with a disease or condition in need of treatment. For the purposes of the present disclosure, the subject may be a primate, preferably a human, or another mammal, such as a dog, cat, horse, pig, goat, or bovine, and the like.

[1235] The term “specifically active in an area or in a tissue” refers to a promoter which is predominantly active in that area or tissue, i.e. more active in that area or tissue than in other areas or tissues.

[1236] Unless indicated otherwise, “efficient transduction” or “efficient tropism,” or similar terms, can be determined by reference to a suitable control (e.g., at least about 10%, 15%, 20%, 25%, 30%, 35%, 40%, 45%, 50%, 55%, 60%, 65%, 70%, 75%, 80%, 85%, 90%, 95%, 100%, 125%, 150%, 175%, 200%, 250%, 300%, 350%, 400%, 500% or more of the transduction or tropism, respectively, of the control). In particular embodiments, the virus vector efficiently transduces or has efficient tropism for neuronal cells and cardiomyocytes. Suitable controls will depend on a variety of factors including the desired tropism and/or transduction profile.

[1237] A “therapeutic polypeptide” is a polypeptide that can alleviate, reduce, prevent, delay and/or stabilize symptoms that result from an absence or defect in a protein in a cell or subject and/or is a polypeptide that otherwise confers a benefit to a subject, e.g., enzyme replacement to reduce or eliminate symptoms of a disease, or improvement in transplant survivability or induction of an immune response.

[1238] The terms “heterologous nucleotide sequence” and “heterologous nucleic acid molecule” are used interchangeably herein and refer to a nucleic acid sequence that is not naturally occurring in the virus. Generally, the heterologous nucleic acid molecule or heterologous nucleotide sequence comprises an open reading frame that encodes a polypeptide and/or nontranslated RNA of interest (e.g., for delivery to a cell and/or subject), for example the inhibitor of PP1.

[1239] Furthermore, the term “about,” as used herein when referring to a measurable value such as an amount of the length of a polynucleotide or polypeptide sequence, dose, time, temperature, and the like, is meant to encompass the exact specified amount and variations of ± 20%, ± 10%, ± 5%, ± 1%, ± 0.5%, or event 0.1% of the specified amount.

[1240] Also as used herein, “and/or” refers to and encompasses any and all possible combinations of one or more of the associated listed items, as well as the lack of combinations when interpreted in the alternative (“or”).

[1241] As used herein, the transitional phrase “consisting essentially of means that the scope of a claim is to be interpreted to encompass the specified materials or steps recited in the claim, “and those that do not materially affect the basic and novel characteristic(s)” of the claimed invention. See, In re Herz, 537 F.2d 549, 551-52, 190 USPQ 461,463 (CCPA 1976) (emphasis in the original); see also MPEP § 2111.03. Thus, the term “consisting essentially of when used in a claim of this invention is not intended to be interpreted to be equivalent to “comprising.” Unless the context indicates otherwise, it is specifically intended that the various features of the invention described herein can be used in any combination.

[1242] Moreover, the present invention also contemplates that in some embodiments of the invention, any feature or combination of features set forth herein can be excluded or omitted.

### EXAMPLES

### Materials and Methods

[1243] DNA preparations were transfected into H9C2 (a rat BDIX heart myoblast cell line, available from ATCC), C2C12 (an immortalized mouse myoblast cell line, available from ATCC), or H2K 2B4 (an immortal satellite cell-derived cell-line, see PLoS One. 2011; 6(9): e24826) to assess transcriptional activity.

### H9C2 Cell Culture and Transfection

[1244] H9C2 are a rat BDIX heart myoblast cell line (rat cardiomyocyte cells). They have skeletal muscle properties, e.g. myotubes formed at confluency respond to acetylcholine.

[1245] H9C2 Cell Maintenance: H9C2 cells were cultured in DMEM (High Glucose, D6546, Sigma) with 1% FBS (Heat inactivated -Gibco 10270-106, lot number 42G2076K), 1% Glutamax (35050-038, Gibco), 1% Penicillin-streptomycin solution (15140-122, Gibco), in T-75 flasks. Cells were passaged at a sub confluent stage (70-80%) to avoid risk of the cells becoming confluent and fusing to form myotubes.

[1246] For passaging during cell maintenance, culture media was removed, cells were washed twice with 5 ml DPBS without CaC12, without MgC12 (14190-094, Gibco). The cells were detached from the flask by incubating with 1 ml Trypsin EDTA (25200-056, Gibco) for approximately 5 minutes. Then, 4 ml of culture medium was added to the flask and the mixture was gently pipetted up and down to help detach the cells from the flask surface. Cells were pelleted at 100 g for 3 minutes. Supernatant was disposed and cells were resuspended in 3 ml of culture medium. Cells were counted on the Countess automated cell counter, seeded at 1:3 to 1:10 i.e. seeding 1-3x10,000 cells/cm2 and incubated at 37° C. 5% C02.

[1247] H9C2 Cell Transfection and differentiation: H9C2 cells were collected from two T-75 flasks of approximately 70-80% confluency, by washing with DPBS, detaching from the flask using 1 ml Trypsin EDTA, washing off the flask’s surface with 4 ml of culture medium and pelleting at 100 g for 3 minutes, as described above. Cells were resuspended in 45 ml culture medium and seed at a density of 40,000 cells/well in a 48 well flat bottom plate (300 µl/well) (353230, Corning). Cells in 48 -well plates were incubated at 37° C. 5% CO2.

[1248] Twenty-four hours later, the culture medium on the cells was replaced with 300 µl antibiotic-free culture medium (i.e DMEM (High Glucose, D6546, Sigma) with 1% FBS (Heat inactivated -Gibco 10270-106, lot number 42G2076K), 1% Glutamax (35050-038, Gibco)). 300 ng of DNA per well was transfected with viafect (E4981, Promega) in a total complex volume of 30 µl per well. Plates were gently mixed following transfection and incubated at 37° C. 5% CO2.

[1249] Twenty-four hours later, culture medium was removed from transfected cells and replaced with 300 µl differentiation media consisting of DMEM (High Glucose, D6546, Sigma), 1% Glutamax (35050-038, Gibco), 1% FBS (Heat inactivated -Gibco 10270-106, lot number 42G2076K), 1% Penicillin/streptomycin solution (15140-122, Gibco) and 0.1% Retinoid Acid (Sigma-R2625). Plates were incubated at 37° C. 5% CO2 for 7 days to induce differentiation. After differentiation, cell morphology was observed to confirm differentiation into myotubes.

[1250] Cells were then washed with 500 µl DPBS, and lysed with 100 µl Luciferase Cell Culture Lysis 5X Reagent (E1531, Promega) diluted to IX using Milli-Q water. Cell lysis reagent was pipetted up and down ten times and plates were then vortexed on a medium power for 30 minutes to promote cell lysis. Plates were sealed and stored at -80° C. prior to completing a luciferase assay. All data collected from luciferase assays following transfections in H9C2 cells is based on three technical replicates and three biological replicates.

### H2K 2B4 (H2K) Cell Culture and Transfection

[1251] H2K Cell Maintenance: H2K cells are mouse skeletal muscle cells, and were cultured in DMEM (High Glucose, D6546, Sigma) with 20% FBS (Heat inactivated -Gibco 10500-064, lot number 08Q2771K), 1% Glutamax (35050-038, Gibco), 1% Penicillin-streptomycin solution (15140-122, Gibco), 0.5% Chicken embryo extract (MD-004E-UK, LSP, lot number A20418), 0.2% Mouse IFN-γ (315-05, Peprotech, lot number 061798C2918) in T-75 flasks. Cells were passaged every 3-4 days when the cells had reached a confluency of 4 — 6.7 x 104 cells/cm2. To passage, culture media was removed, cells were washed twice with 5 ml DPBS without CaC12, without MgC12 (14190-094, Gibco) and cells were detached from the flask using 1 ml Trypsin EDTA (25200-056, Gibco). Cells were incubated with Trypsin EDTA for approximately 2 minutes, before adding 4 ml of culture medium to the flask and gently pipetting up and down to wash the cells from the flask surface. Cells were pelleted at 100 g for 3 minutes. Supernatant was disposed and cells were resuspended in 6 ml of culture medium. Cells were counted on the Countess automated cell counter, seeded at 4 densities of 4000, 2700, 2000 or 1300 cells/cm2 and incubated at 33° C. 10% CO2.

[1252] H2K Cell Transfection and Differentiation: H2K cells were collected from three T-75 flasks of approximately 20-40% confluency, by washing with DPBS, detaching from the flask using 1 ml Trypsin EDTA for approximately 2 minutes, washing off flask surface with 4 ml of culture medium and pelleting at 100 g for 3 minutes. Cells were resuspended in 45 ml culture medium at a density of 8000 cells/100 µl culture medium. 100 µl of cell suspension was then dispensed into each well of a 96-well Matrigel-coated (Corning, ref. 354234, lot. 8085009) plate using a BioFill Solo Reagent Dispenser (Brooks Automation Ltd, Catalog #34-1000). Cells in 96-well plates were incubated at 33° C. 10% CO2.

[1253] Twenty-four hours later, the culture medium on the cells was replaced with 100 µl antibiotic-free culture medium (i.e. DMEM (High Glucose, D6546, Sigma) with 20% FBS (Heat inactivated -Gibco 10500-064, lot number 08Q2771K), 1% Glutamax (35050-038, Gibco), 0.5% Chicken embryo extract (MD-OO4E-UK, LSP, lot number A20418), 0.2% Mouse IFN-γ (315-05, Peprotech, lot number 061798C2918). 150 ng of DNA per well was transfected with 0.3 µl Lipofectamine 3000 in a total complex volume of 10 µl per well. Plates were gently mixed following transfection and incubated at 33° C. 10% CO2. Twenty-four hours later, culture medium was removed from transfected cells and replaced with 200 µl differentiation media consisting of DMEM (High Glucose, D6546, Sigma), 0.1% Glutamax (35050-038, Gibco), 0.2% Horse serum (GIBCO, ref. 16050-122, lot.1671317), 0.02% Chicken embryo extract (MD-004E-UK, LSP, lot number A20418), 0.1% Penicillin/streptomycin solution (15140-122, Gibco). Plates were incubated at 37° C. 5% CO2 for 72 hours to induce differentiation. After differentiation, cell morphology was observed to confirm differentiation into myotubes. Cells were then washed with 250 µl DPBS, followed by lysis with 50 µl Luciferase Cell Culture Lysis 5X Reagent (E1531, Promega) diluted to 1X using Milli-Q water. Cell lysis reagent was pipetted up and down ten times and plates were then vortexed on a medium power for 10 minutes to promote cell lysis. Plates were sealed and stored at -80° C. prior to completing a luciferase assay.

### Luciferase Assay Preparation

[1254] 96-well plates containing lysed cells were thawed at room temperature, vortexed on a medium power for 10 minutes and centrifuged for 1 minute at 2250 g. 10µl of lysate was transferred from each well into a white Microplate FluoroNunc 96 well flat bottom (Fisher Scientific, 10346331). Luciferase read-outs were generated using LAR (Promega, catalog# E4550) injections on a BMG Labtech FLUOstar Omega plate reader as described below. All data collected from luciferase assays following transfections in H2K cells is based on four technical replicates and three biological replicates.

### C2C12 Cell Culture and Transfection

[1255] C2C12 Cell maintenance: C2C12 cells were cultured in DMEM (High Glucose, D6546, Sigma) with 10% FBS (Heat inactivated -Gibco 10500-064), 1% Glutamax (35050-038, Gibco), 1% Penicillin-streptomycin solution (15140-122, Gibco) in T-75 flasks. Cells were fed every 2-3 days with fresh medium and passaged when they reached 70% confluency. To passage, culture media was removed, cells were washed twice with 5 ml DPBS without CaC12, without MgC12 (14190-094, Gibco) and cells were detached from the flask (T-75) using 1 ml Trypsin EDTA (25200-056, Gibco). Cells were incubated at 37° C. (in CO2 incubator) for 3 to 5 mins, until the cells detached as determined under the microscope. 4 ml of complete culture medium was added to the flask to inactivate Trypsin and cell suspension was transferred to a 15 ml tube. Cells were pelleted at 250 g for 3 minutes. Supernatant was disposed of and cells were resuspended in 6 ml of culture medium. Cells were counted on the Countess automated cell counter, seeded at a 1:10 dilution and incubated at 37° C. 5% CO2.

[1256] C2C12 Cell Transfection and Differentiation: C2C12 cells were collected from T-75 flasks once they reached 80% confluency by washing with DPBS, detaching from the flask using 1 ml Trypsin EDTA for approximately 3-5 minutes, washing off the flask surface with 4 ml of culture medium and pelleting at 250 g for 3 minutes. Cells were resuspended at specific densities depending on the passage number (see Table 12 for details).

TABLE 12

| | |
|---|---|
| Passages of C2C12 | SEEDING CELL DENSITY PRIOR TO TRANSFECTION (48 WELL-PLATE) |
| p.4, p.5, p.6 | 45,000 cells/300 µl media |
| p.7, p.8, p.9 | 40,000 cells/300 µl media |
| p.10, p.11, p.12 | 38,000 cells/300 µl media |

[1257] 300 µl of appropriate cell suspension (based on passage number) was then dispensed into each well of a 48-well plate. Cells in 48-well plates were incubated at 37° C. 5% CO2.

[1258] Twenty-four hours later, the culture medium on the cells was replaced with 300 µl of prewarmed transfection medium containing DMEM (High Glucose, D6546, Sigma) and 1% Glutamax. 300 ng of DNA was transfected with 0.9 µl Viafect (E4981, Promega) in a total complex volume of 30 µl per well. Plates were gently mixed following transfection and incubated at 37° C. 5% CO2.

[1259] Twenty-four hours later, culture medium was removed from transfected cells and replaced with differentiation media consisting of DMEM (high glucose, no sodium pyruvate, 11960-044, Gibco), 1% Glutamax, 2% Horse Serum (Heat Inactivated, 16050-122, Gibco). Plates were incubated at 37° C. 5% CO2 for a further 5.5 days to induce differentiation. After differentiation, cell morphology was observed to confirm differentiation into myotubes. Cells were then washed with 300 µl DPBS, followed by lysis with 100 µl Luciferase Cell Culture Lysis 5X Reagent (E1531, Promega) diluted to 1X using Milli-Q water. Plates were sealed and stored at -80° C. prior to completing a luciferase assay.

[1260] C2C12 Luciferase Assay preparation: 48-well plates containing lysed cells were thawed at room temperature, vortexed on a medium power for 10 minutes and centrifuged for 1 minute, 2250xg. 10 µl of lysate was transferred from each well into a white Microplate FluoroNunc 96 well flat bottom (Fisher Scientific, 10346331). Luciferase read-outs were generated using LAR (Promega, catalog# E4550) injections on a BMG Labtech FLUOstar Omega plate reader as described below. All data collected from luciferase assays following transfections in C2C12 cells is based on three technical replicates and three biological replicates.

### Measurement of Luciferase Activity

[1261] Luciferase activity was measured using LARII (Dual Luciferase Reporter 1000 assay system, Promega, E1980). 24 h after transfection, the media was removed from the cells. The cells were washed once in 300 µl of DPBS. Cells were lysed using 100 µl of passive lysis buffer and incubated with rocking for 15 minutes. The cell debris was pelleted by centrifugation of the plate at max speed in a benchtop centrifuge for 1 min. 10 µl sample was transferred into white 96-well plate and luminescence measured by injection of 50 µl of LARII substrate on a BMG Labtech FLUOstar Omega plate reader, according to manufacturing instructions.

### Exemplary Formulation Pharmaceutical Compositions

[1262] In various aspects of the present invention, the pharmaceutical composition comprises recombinant AAV vector comprising rAAV-I1c (e.g. AAV2i8sc.CMV.I1c), in 10 mM Phosphate pH 7.4, 200 mM NaCl, 5 mM KCl, 1% (w/v) mannitol, 0.0005% (w/v) IGEPAL® CA 720 (polyoxyethylene (12) isooctylphenyl ether) to a fill volume of 5 ml. In some embodiments, the fill volume is 1 ml, 2 ml, 3 ml, 4 ml, 5 ml, 6 ml, 7 ml, 8 ml, 9 ml, or, 10 ml.

[1263] In one aspect of the present invention, the pharmaceutical composition comprises recombinant AAV vector comprising rAAV-I1c (e.g. AAV2i8sc.CMV.I1c), in 20 mM Phosphate pH 7.4, 300 mM NaCl, 3 mM KCl, 3% (w/v) mannitol, 0.001% (w/v) Brij S20 to a fill volume of 5 ml. In some embodiments, the fill volume is 1 ml, 2 ml, 3 ml, 4 ml, 5 ml, 6 ml, 7 ml, 8 ml, 9 ml, or, 10 ml.

[1264] In several aspects of the present invention, the pharmaceutical composition comprises recombinant AAV vector comprising rAAV-I1c (e.g. AAV2i8sc.CMV.I1c), in 20 mM Phosphate pH 7.4, 300 mM NaCl, 3 mM KCl, 3% (w/v) sorbitol, 0.001% (w/v) Ecosurf SA-15 to a fill volume of 5 ml. In some embodiments, the fill volume is 1 ml, 2 ml, 3 ml, 4 ml, 5 ml, 6 ml, 7 ml, 8 ml, 9 ml, or, 10 ml.

[1265] In various aspects of the present invention, the pharmaceutical composition comprises recombinant AAV vector comprising rAAV-I1c (e.g. AAV2i8sc.CMV.I1c), in 10 mM Phosphate pH 7.4, 350 mM NaCl, 2.7 mM KCl, 5% (w/v) sorbitol, 0.001% (w/v) poloxamer 188 to a fill volume of 5 ml. In some embodiments, the fill volume is 1 ml, 2 ml, 3 ml, 4 ml, 5 ml, 6 ml, 7 ml, 8 ml, 9 ml, or, 10 ml.

[1266] Several aspects of the present invention provided herein, the pharmaceutical composition comprises recombinant AAV vector comprising rAAV-I1c (e.g. AAV2i8sc.CMV.I1c), in 15 mM Phosphate pH 7.4, 375 mM NaCl, 3.5 mM KCl, 5% (w/v) sorbitol, 0.0005% (w/v) Tergitol NP-10 to a fill volume of 5 ml. In some embodiments, the fill volume is 1 ml, 2 ml, 3 ml, 4 ml, 5 ml, 6 ml, 7 ml, 8 ml, 9 ml, or, 10 ml.

[1267] In one of the aspects of the present invention, the pharmaceutical composition comprises recombinant AAV vector comprising rAAV-I1c (e.g. AAV2i8sc.CMV.I1c), in 15 mM Phosphate pH 7.4, 375 mM NaCl, 3.5 mM KCl, 3% (w/v) glycerol, 0.0005% (w/v) Tween 80 to a fill volume of 5 ml. In some embodiments, the fill volume is 1 ml, 2 ml, 3 ml, 4 ml, 5 ml, 6 ml, 7 ml, 8 ml, 9 ml, or, 10 ml.

### Example 1

[1268] In vivo assessment of muscle specific promoters: An expression cassette comprising SP0067 or the control promoters CBA, CK8 driving the luciferase gene was created and a rAAV2/9 vector comprising these expression cassettes were purified through high performance liquid chromatography (HPLC). rAAVs were diluted in 0.9% saline and delivered via tail vein into 8 8-week old male Balb/c (wild type) mice at 200 µl/mouse at a dose of 1e+12 vg/mouse. Mice were sacrificed 6 weeks after and the diaphragm (skeletal muscle), heart (cardiac muscle), intestine (skeletal muscle), kidney (specificity control tissue), liver (specificity control tissue), lung (specificity control tissue), quadriceps (skeletal muscle), spleen (specificity control tissue), and tibialis anterior (skeletal muscle) were collected, and divided into 3 parts. Samples were snap-frozen in liquid nitrogen, immediately after dissection, and stored at -80° C. The readouts for Diaphragm, Heart, Intestine, Liver, Quadriceps, and Tibialis anterior (TA) were created by protein quantification (using BCA Pierce protein assay kit; Promega 23225) and Luciferase quantification (using ONE-Glo Luciferase Assay System; Promega E6120). RLU values, were calculated as pg/mg extracted protein.

[1269] FIGS. 1-3 show that cardiac-specific promoter SP0067 active in vivo in the heart, but is not very active in vivo in skeletal muscle (diaphragm, quadriceps, tibialis anterior, intestine). While in this embodiment, SP0067 is less active in the heart muscle than the CBA and CK8.intron control promoters, unlike these generic control promoters, SP0067 is highly specific for cardiac muscle in vivo as compared to skeletal muscle. SP0067 also has some activity in vivo in liver. FIGS. 4A-4B show in vitro expression of luciferase from rAAV2/9 operatively linked to SP0067 and other synthetic cardiac-specific promoters in cardiac myotubes and skeletal muscle myotubes in vitro.

[1270] H9C2 cells were used to assess the in vitro activity of shortened nucleic acid sequences of exemplary muscle-specific promoters active in cardiac and skeletal muscle. FIG. 8 shows the in vitro activity of synthetic short muscle specific promoters SP0521 and SP4169 in the muscle cell line H9C2 which is differentiated into heart myotubes, as compared to CBA and CK8 control promoters. FIG. 8 shows that synthetic promoters SP0521 and SP4169 show good activity in the muscle cell line H9C2. Additional muscle-specific promoters active in cardiac and skeletal muscle SP0502, SP0515, SP0522, SP0523 and SP524 were also tested experimentally in the H9C2 cell line but showed lower activity (data not shown).

### Example 2

### In Vivo Testing

[1271] Expression cassettes comprising each of SP0173, SP0270, SP0268, SP0320, SP0134, SP0279, SP0057, SP0229, SP0310, SP0067, and SP0267, or the control promoters CBA and CK8 driving the luciferase gene were created and AAV2/9 comprising these expression cassettes were purified through high performance liquid chromatography (HPLC). AAVs were diluted in 0.9% saline and delivered via tail vein into 8 8-week old male Balb/c (wild type) mice at 200 µl/mouse at a dose of le+ 12 vg/mouse. Mice were sacrificed 6 weeks after, and the diaphragm (skeletal muscle), heart (cardiac muscle), intestine (skeletal muscle), kidney (specificity control tissue), liver (specificity control tissue), lung (specificity control tissue), quadriceps (skeletal muscle), spleen (specificity control tissue), and tibialis anterior (skeletal muscle) were collected, and divided into 3 parts. Samples were snap-frozen in liquid nitrogen, immediately after dissection, and stored at -80° C. The readouts for Diaphragm, Heart, Intestine, Liver, Quadriceps, and Tibialis anterior were created by protein quantification (using BCA Pierce protein assay kit; Promega 23225) and Luciferase quantification (using ONE-Glo Luciferase Assay System; Promega E6120). RLU values were calculated as pg/ml.

[1272] The x axis in FIGS. 5A-5F is in logarithmic scale. In order to plot the data in a logarithmic scale (log₁₀), the normalised RLU values were multiplied by 10⁹ before the conversion to logarithmic scale. The x axis represents log₁₀ of normalised RLU values times 10⁹. The x axis in FIG. 1, FIG. 2, and FIGS. 6A-6F represents RLU values (pg/ml).

[1273] The synthetic promoters tested in vivo were much more active in the heart, diaphragm, quadriceps and tibialis anterior than in the liver and intestine as shown in FIGS. 6A-6F.

[1274] Some promoters such as SP0270 and SP0268 (FIGS. 6B and 6C) were more active in skeletal muscle (diaphragm and tibialis anterior) than cardiac muscle (heart). Other promoters such as SP0057, SP0229, and SP0067 (FIGS. 6G, 6H, and FIG. 6I) were more active in the cardiac muscle (heart) than the skeletal muscle (diaphragm and tibialis anterior).

[1275] FIG. 1 and FIG. 6I show that cardiac muscle-specific promoter SP0067 is not active in skeletal muscle (diaphragm, quadriceps, tibialis anterior, intestine) but is active in the heart. SP0067 is less active in the heart muscle than control promoters CBA and CK8 but unlike these generic control promoters, it is highly specific for cardiac muscle compared to skeletal muscle. SP0067 also has some activity in liver.

### Example 3

### Assessment of Cardiac-Specific Promoters in Vivo:

[1276] Expression cassettes comprising each of cardiac-specific promoters SP0067, SP0451, SP0452, SP0430, SP0450, SP0429, SP0424, SP0435, SP0436, SP0433, SP0449, SP0344, SP0475, or the control promoters (CK8 — as a muscle promoter control, or cardiac specific promoters control 1 (SEQ ID NO: 288) and control 2 (SEQ ID NO: 289)) promoters as cardiac-specific positive control) in driving the luciferase gene were created and AAV2/9 comprising these expression cassettes were produced as disclosed in Example 2. Cardiac specific control promoters 1 and 2 have been previously described in Bezzerides, et al. “Gene therapy for catecholaminergic polymorphic ventricular tachycardia by inhibition of Ca2+/calmodulin-dependent kinase II.” Circulation 140.5 (2019): 405-419. The rAAV were purified through iodixanol gradient. Mice were administered the rAAV as disclosed in Example 2, and sacrificed 6 weeks after, and the diaphragm (skeletal muscle), heart (cardiac muscle), liver (specificity control tissue), quadriceps (skeletal muscle), solus (slow-twitch muscle), and tibialis anterior (skeletal muscle) were collected, and divided into 3 parts. Samples were snap-frozen in liquid nitrogen, immediately after dissection, and stored at -80° C. The readouts for Diaphragm, Heart, Liver, Quadriceps, and Tibialis anterior were created by protein quantification (using BCA Pierce protein assay kit; Promega 23225) and Luciferase quantification (using ONE-Glo Luciferase Assay System; Promega E6120). RLU values were calculated as RLU/mg of extracted protein (FIGS. 7A-7M).

[1277] The synthetic promoters tested in vivo were much more active in the heart, diaphragm, quadriceps and tibialis anterior than in the liver as shown in FIGS. 7A-7M.

[1278] Some cardiac-specific promoters such as SP0424 (FIG. 7C), SP0429 (FIG. 7E), SP0430 (FIG. 7F), SP0435 (FIG. 7I), SP0450 (FIG. 7M), SP0451 (FIG. 7N) and SP0452 (FIG. 7O) all showed specific expression in the heart, with lower expression levels in other muscle tissues. The promoters show significantly low experession in liver that makes the use of these rAAV comprising these promoters as having liver detargetting effect. Furthermore, these rAAVs, with any AAV serotype except AAV2i8 or, BNP116, comprising these cardiac specific promoters with liver detargetting effect can be used for repeat administration, where, AAV2i8 is used in one administration and rAAVs with any AAV serotype except AAV2i8 or, BNP116 comprising these cardiac specific promoters, can be used in the other administration.

[1279] The control 1 (FIG. 7H) and control 2 (FIG. 7K) cardiac specific promoters were previously disclosed in Bezzerides, et al. “Gene therapy for catecholaminergic polymorphic ventricular tachycardia by inhibition of Ca2+/calmodulin-dependent kinase II.” Circulation 140.5 (2019): 405-419 and used as controls in this study along with the CK8 control.

### Example 4

[1280] rAA V vector manufacturing: Described herein in is a method of manufacturing rAAV viral vectors from Pro10/HEK293 cells that have been engineered to stably express the I-1 gene.

[1281] The stable cell line, Pro10/HEK293, as described in U.S. Pat. No. 9,441,206, is ideal for scalable production of AAV vectors. This cell line can be contacted with an expression vector used to express the I-1 gene operatively linked to cardiac-specific promoter SP0067 (SEQ ID NO: 3). Clonal populations having I-1 expression integrated into their genome are selected using methods well known in the art. Expression of the I-1 gene is confirmed via western-blotting.

[1282] Pro10/HEK293 cells stably expressing I-1 are transfected with a Packaging plasmid encoding Rep2 and serotype-specific Cap2: AAV-Rep/Cap, and the Ad-Helper plasmid (XX680: encoding adenoviral helper sequences).

[1283] Transfection. On the day of transfection, the cells are counted using a ViCell XR Viability Analyzer (Beckman Coulter) and diluted for transfection. To mix the transfection cocktail the following reagents are added to a conical tube in this order: plasmid DNA, OPTIMEM® I (Gibco) or OptiPro SFM (Gibco), or other serum free compatible transfection media, and then the transfection reagent at a specific ratio to plasmid DNA. The cocktail is inverted to mix prior to being incubated at room temperature. The transfection cocktail is pipetted into the flasks and placed back in the shaker/incubator. All optimization studies are carried out at 30 mL culture volumes followed by validation at larger culture volumes. Cells are harvested 48 hours post-transfection.

[1284] Production of rAAV Using Wave Bioreactor Systems. Wave bags are seeded 2 days prior to transfection. Two days post-seeding the wave bag, cell culture counts are taken and the cell culture is then expanded/diluted before so transfection. The wave bioreactor cell culture is then transfected. Cell culture is harvested from the wave bio-reactor bag at least 48 hours post-transfection.

[1285] Titer: AAV titers are calculated after DNase digestion using qPCR against a standard curve (AAV ITR specific) and primers specific to I-1 gene.

[1286] Harvesting Suspension Cells from Shaker Flasks and 60 Wave Bioreactor Bags. 48 hours post-transfection, cell cultures are collected into 500 mL polypropylene conical tubes (Coming) either by pouring from shaker flasks or pumping from wave bioreactor bags. The cell culture is then centrifuged at 655xg for 10 min using a Sorvall RC3C plus centrifuge and H6000A rotor. The supernatant is discarded, and the cells are resuspended in 1xPBS, transferred to a 50 mL conical tube, and centrifuged at 655xg for 10 mM. At this point, the pellet can either be stored in NLT-60° C. or continued through purification.

[1287] Titering rAAV from Cell Lysate Using qPCR. 10 mL of cell culture is removed and centrifuged at 655xg for 10 min using a Sorvall RC3C plus centrifuge and H6000A rotor. The supernatant is decanted from the cell pellet. The cell pellet is then resuspended in 5 mL of DNase buffer (5 mM CaC12, 5 mM MgC12, 50 mM Tris-HC1 pH 8.0) followed by sonication to lyse the cells efficiently. 300 uL is then removed and placed into a 1.5 mL microfuge tube. 140 units of DNase I is then added to each sample and incubated at 37° C. for 1 hour. To determine the effectiveness of the DNase digestion, 4-5 mg of I-1 plasmid is spiked into a non-transfected cell lysate with is and without the addition of DNase. 50 µL of EDTA/Sarkosyl solution (6.3% sarkosyl, 62.5 mM EDTA pH 8.0) is added to each tube and incubated at 70° C. for 20 minutes. 50 pL of Proteinase K (10 mg/mL) is then added and incubated at 55° C. for at least 2 hours. Samples are boiled for 15 minutes to inactivate the Proteinase K. An aliquot is removed from each sample to be analyzed by qPCR. Two qPCR reactions are carried out in order to effectively determine how much rAAV vector is generated per cell. One qPCR reaction is set up using a set of primers 2 s designed to bind to a homologous sequence on the backbones of plasmids XX680, pXR2 and I-1. The second qPCR reaction is set up using a set of primers to bind and amplify a region within the I-1 gene. qPCR is conducted using Sybr green reagents and Light cycler 480 from 30 Roche. Samples are denatured at 95° C. for 10 minutes followed by 45 cycles (90° C. for 10 sec, 62° C. for 10 sec and 72° C. for 10 sec) and melting curve (1 cycle 99° C. for 30 sec, 65° C. for 1 minute continuous).

[1288] Purification of rAAV from Crude Lysate. Each cell pellet is adjusted to a final volume of 10 mL. The pellets are vortexed briefly and sonicated for 4 minutes at 30% yield in one second on, one second off bursts. After sonication, 550 U of DNase is added and incubated at 37° C. for 45 minutes. The pellets are then centrifuged at 9400xg using the Sorvall RCSB centrifuge and HS-4 rotor to pellet the cell debris and the clarified lysate is transferred to a Type70Ti centrifuge tube (Beckman 361625). In regard to harvesting and lysing the suspension HEK293 cells for isolation of rAAV, one skilled in the art can use as mechanical methods such as microfluidization or chemical methods such as detergents, etc., followed by a clarification step using depth filtration or Tangential Flow Filtration (TFF).

[1289] AAV Vector Purification. Clarified AAV lysate is purified by column chromatography methods as one skilled in the art would be aware of and described in the following manuscripts (Allay et al., Davidoff et al., Kaludov et al., Zolotukhin et al., Zolotukin et al, etc.), which are incorporated herein by reference in their entireties.

### Example 5

### Efficacy of rAAV Expressing I-1c to Treat Heart Failure in Humans:

[1290] Described herein in Example 5 is a method of administrating a rAAV viral vector expressing the I-1c gene to human patients for the treatment of heart failure according to the methods disclosed herein. Example 5 shows results of human patients with heart failure (non-ischemic cardiomyopathy) administered AAV2i8.sc-CMV.I1c, which is produced from the plasmid of SEQ ID NO: 441 (AAV 2i8 sc in this example and other examples, refers to AAv2i8 having self complementary genome). The AAV vector AAV2i8.sc-CMV.I1c used in Example 5 used solely an exemplary rAAV, and any rAAV disclosed herein can be used in the methods to treat heart failure as disclosed herein. For example, one of ordinary skill in the art can readily substitute the CMV promoter in the AAV2i8.sc-CMV.I1c used in Example 5 for a cardiac-specific promoter, e.g, any cardiac specific promoter, or muscle specific promoter active in cardiac muscle disclosed in Tables 2A or 5A, or shown in FIGS. 7B-7O. Similarly, the AAV2i8.sc-CMV.I1c used in Example 5 can be readily substituted for a rAAV comprising a codon-optimized nucleic acid sequence encoding I-1c, such as, but not limited to the nucleic acid sequences of SEQ ID NO: 385-412. Similarly, the AAV2i8.sc-CMV.I1c used in Example 5 can be readily substituted for a rAAV comprising a nucleic acid comprising codon optimized nucleic acid sequence encoding I-1c, such as, but not limited to the nucleic acid sequences of SEQ ID NO: 385-412; and the nucleic acid further comprising a poly A e.g HGH poly A or SV40 poly A and RNA polymerase II transcriptional pause signal from alpha 2 globin gene. Similarly, the AAV2i8.sc-CMV.I1c used in Example 5 can be readily substituted for a rAAV comprising a nucleic acid sequence of SEQ ID NO: 413-440, or modified version thereof. rAAV lacking bacterial sequence and comprising the AAV2i8.sc-CMV.I1c used in Example 5 can be manufactured from any of linear duplex DNA of SEQ ID NO: 357-384.

[1291] 7 Patients with symptomatic congestive heart failure received infusions of AAV2i8.sc-CMV.I1c, where the rAAV vector is AAV2i8, and which expresses the I-1c protein (amino acids 1-65 with the T35D modification) under the CMV promoter. A single intracoronary infusion of AAV2i8.sc-CMV.I1c was administered to 7 patients with NYHA Class III heart failure, where administration occurred as single administration of a total dose selected from (i) 3 × 10¹³ vg (n=3) (ii) 1 × 10¹⁴ vg (n=4). All the patients in the study had non-ischemic cardiomyopathy. The total dose was administered to patients in a series of 5 sub-doses, each sub-dose administered from a separate syringe, and where the 5 sub-doses were administered to the subject over a period of about 25-30 minutes. In such instances, the total rAAV dose is diluted in 50 ml saline and administered as 5 sub-doses in 5 syringes, with 10 ml volume in each syringe. The administration is performed over a time period of about 5 minutes for each of the five syringes, one syringe after another, with frequent stops checking the position of catheters in each coronary artery using contrast injections. All patients were followed until 12 months post treatment intervention, and then undergo long-term follow-up via semi-structured telephone questionnaires every 6 months for an additional 24 months (+/- 30 days). The patients were coadministered with vasodilator e.g. nitroglycerin about 25 minutes prior to rAAV administration.

[1292] Before administration (i.e. at screening), and after 4-weeks (+/- 3 days), 6 months and 12-months post-administration, the patients were assessed using a variety of physiological assessments and clinical parameters. For example, echocardiographic assessments of LVEF, LVEVD, LVEDVI, VLESV, LVEVI, SpI and GLS and degree of mitral regurgitation was assessed, as well as serum NT-proBNP level, as well as secondary effects assessed to determine efficacy of the administration of the AAV2i8.sc-CMV.I1c rAAV vector. Secondary effects include, e.g., but are not limited to (i) Peak VO₂ assessed by cardiopulmonary exercise testing, (ii) 6-minute walk test (6MWT), (iii) New York Heart Association (NYHA) Classification, (iv), total number of days alive out-of-hospital (as well as total days out-of-hospital as a% of total days alive post study intervention) (v), quality of Life at 6 and 12 months compared to baseline, (vi) Health related quality of life as assessed by Minnesota Living with Heart Failure Questionnaire (MLWHFQ). Also assessed at 12-months and long-term follow-up period (until month 36 post-intervention) was patient, need for cardiac transplantation, or left ventricular assist device (LVAD) implantation. Each of these clinical parameters are discussed below:

[1293] NYHA: NYHA class is a clinician-assessed measure of patients’ functional status, and is widely used in clinical trials due to its simplicity and prognostic value.

[1294] LVEF: LVEF is indicative of cardiac systolic function and measures as a percentage the amount of blood pumped out of the left ventricle with each contraction. Reduction in EF is associated with cardiac remodeling. Treatment-induced changes in LVEF may be predictive of an effect on mortality. Each patient had an improvement in LVEF from baseline to Month 12. The absolute percent increase in patient 1 was +10.5%, in patient 2, +22%, and in patient 3, +6%. In some patients, the improvement in LVEF was associated with decreases in both left ventricular end systolic volumes and left ventricular end-diastolic volumes. In addition, it was noted that from the time of screening to month 12, all patients had improvements in left ventricular wall motion abnormalities.

[1295] 6MW Test: The 6MWT is a standard means for assessing submaximal exercise capacity, and is defined as the distance in meters walked in 6 minutes. 6MWT is considered a surrogate for quality of life, and performance correlates strongly with subsequent clinical outcomes.

[1296] VO2Max: Cardiopulmonary testing and measurement of Peak VO2 measure during maximal exercise have been used for assessment of aerobic capacity, establishment of prognosis in heart failure patients, and evaluation of benefits of various forms of intervention. Most recently, EXPLORER-HCM trial evaluated the effectiveness of Mavacamten in patients with obstructive cardiomyopathies using the primary composite functional end point at week 30 compared to baseline defined as either (1) an increase in peak oxygen consumption ≥1.5 mL/kg/min and reduction of at least one New York Heart Association class; or (2) an improvement of ≥3.0 mL/kg/min in peak oxygen consumption with no worsening of New York Heart Association class.

[1297] MLWHFQ: Quality of life is most often assessed with well-validated questionnaires such as the Minnesota Living with Heart Failure Questionnaire (MLWHFQ), which have been shown to be more reproducible than clinician-assessed symptoms.

[1298] BNP: Biomarkers such as brain natriuretic peptides (BNPs) and NTpro-BNP have been used as inclusion criteria for patients with heart failure and to track the effects of treatments in HF patients. Some Patients had a decrease in BNP levels from baseline to Month 12 (-38 and -60), indicative of improvements.

[1299] Primary outcome measures were assessed, which include a change in Peak VO₂ and LVEF levels. To determine the Peak VO₂ change, the Peak VO₂ measured at 6- and 12-months post-administration as compared to the Peak VO₂ before, or at the time of administration (i.e., as compared to baseline), as determined by Cardiopulmonary exercise testing using a modified Bruce protocol. Other primary outcome measures assessed were a change in echocardiographic assessment in Left Ventricular Ejection Fraction (LVEF) measured at the time of administration or screening, 18-24 hours post-administration, 4-weeks, 6 months and 12 months post-administration as compared to the LVEF measured before or at the time of administration (e.g., baseline LVEF level).

[1300] Secondary outcome measures were also assessed, which include a change in results from the 6MWT (6-minute walk test), measured at 6- and 12-months post administration as compared to the results from the 6MWT measured at, or before administration (i.e., as compared to the baseline). Secondary outcome measures of the analysis of % predicted in heart failure subjects as compared to normal subjects was also determined.

[1301] TABLE 19A show the result of clinical improvement using the NYHA classification of patients receiving 3 × 10¹³ vg rAAV expressing I-1c (n=3), where NYHA classification system was assessed at 1-month, 2-months, 3-months, 6-months, 9-months and 12-months post administration.

Dose: 3 × 10¹³ vg/patient

| Patient No: | 2 | | 3 | | 5 | |
|---|---|---|---|---|---|---|
| | NYHA | EF (%) | NYHA | EF (%) | NYHA | EF (%) |
| Screening | III | 35^{∗} | III | 27 | III | 29 |
| 1 month | | | II | 40 | | 25 |
| 3 months | | 39 | | | II | |
| 6 months | II | 41 | I | 41 | II | 41 |
| 9 months | | | | | | |
| 12 months | II | 39 | I | 35 | | |

[1302] TABLE 19B show the result of clinical improvement using the NYHA classification of patients receiving 1 × 10¹⁴ vg rAAV expressing I-1c (n=3), where NYHA classification system was assessed at 1-month, 2-months, 3-months and 6-months post administration.

Dose: 1 × 10¹⁴ vg/patient

| Patient No: | 11 | | 9 | | 13 | | 12 | |
|---|---|---|---|---|---|---|---|---|
| | NYHA | EF (%) | NYHA | EF (%) | NYHA | EF (%) | NYHA | EF (%) |
| Screening | III | 14 | III | 18 | III | 28 | III | 22.5 |
| 1 month | | 23 | | 19 | | 31 | | |
| 3 months | II | 26 | | | | | | |
| 6 months | II | 15 | | | | | | |
| 12 months | | | | | | | | |

[1303] The results (see Table 19A) showed improved classification of patients (receiving 3×10¹³ vg rAAV) of at least one class of the NYHA classification system, and in some instances, subject improve two classes of the NYHA classification within 6 months. For instance, patient No. 2 improved from a class III to a class II within 6 months, and patient No. 3 improved from a class III to a class I within 6 months, demonstrating a suprising and significant improvement in two levels in the NYHA classification system within 6-months of administration. Stated another way, patient No. 3 had a 2 class decrease in the NYHA classification system in 13 months after administration of the rAAV encoding the I-1c. Similar to the 3×10¹³ dose, patients receiving 1×10¹⁴ vg rAAV (Table 19B) also showed improvement of NYHA classification, e.g patient 11 improved by one class as shown by NYHA classification value at 3 months and at 6 months.

[1304] The Ejection Fraction (%EF) was also assessed at the time of screening and at multiple times post administration (e.g., 1-month, 2-months, 3-months, 6-months, 9-months and 12-months post administration) and the results shown in Tables 19A-19B. There was a 5% or greater than 5% increase in EF in most treated patients, e.g., patient Nos. 3 and 5 had%EF increased upto 41% from 27% at baseline and upto 41% from 29% at baseline in 6 months respectively after administration of 3×10¹³ vg rAAV expressing I-1c.

[1305] Summary result of other parameters:

[1306] In 6 minute walk test (6MWT), all patients increased 6 minute walk distance (6MWD) by at least 50 meters within 12 months and some patients increased by 50 meters within 6 months. With respect to MWHF questionnaire, all patients showed a decrease of more than 10 scores in 12 months. All patients increased pVO2max or, MVO2 by 1.5 ml/kg/min or, more in 12 months

[1307] Clinically meaningful changes for each functional test is shown in Table 19C. Administration of the AAV2i8.sc-CMV.I1c rAAV to patients was shown to achieve one or more endpoints in Table 19C.

| | |
|---|---|
| PARAMETER | CHANGE FROM BASELINE |
| Left Ventricular Ejection Fraction | ≥5% Increase |
| Left Ventricular End Systolic Volume | >20 mL or 10% Decrease |
| New York Heart Association Class | 1 Class Decrease |
| Quality of Life (Minnesota Living With Heart Failure Questionaire) | 10-Point Decrease |
| 6 Minute Walk Test | 50-Meter Increase |
| BNP (pg/mL) | 40% Decrease |
| NT-pro-BNP (pg/mL) | 35% Decrease |
| MVO 2 | 1.5 mL/kg/min Increase |

[1308] Accordingly, the results show improved clinical parameters (such as decreased serum NT-pro BNP, increased peak VO₂ (data not shown), increased LVEF etc.) in patients administered AAV2i8.sc-CMV.I1c in a single administration of a total dose selected from (i) 3 × 10¹³ vg (n=3) (ii) 1 × 10¹⁴ vg (n=4), as compared to the clinical parameters (e.g., change in serum NT-pro BNP, change in peak VO2, change LVEF) measured in patients prior to administration.

[1309] In a pig study (data not shown) enhanced transduction of rAAV in the heart of pigs is observed, when the total dose of AAV2i8.sc-CMV.I1c rAAV vector is administered with 5 syringes over a period of about 25 minutes wherein each syringe has 10 ml. saline, as compared to, when the same total dose of AAV2i8.sc-CMV.I1c rAAV vector is administered with two syringes over a time period of 10 minutes, wherein each syringe has 10 ml. saline.

[1310] Based on the significant improvement in HF clinical parameters of non-ischemic cardiomyopathy patients in this Example as detected at 6- or 12 months after administration of the AAV2i8.sc-CMV.I1c, where the patients showed significant improvement in clinical parameters, such as improved NYHA class, increased%EF, increased walk distance on 6MWT, increased peak VO₂ (pVO2 or, MVO2), increased LVEF (or, EF), improved score of MWHFQ (or, KCCQ) etc., it is expected that patients with non-ischemic cardiomyopathies from a range of causes or diseases will also have similar improvement in the HR clinical parameters at least 12-months post administration, including patients with non-ischemic cardiomyopathy due to infections resulting in myocardial inflammation (such as infections by various viruses, including possibly, patients previously infected with SARS-Cov2, or subjects who have had COVID-19 infection, bacterial infections and other parasites), noninfectious inflammations (such as those due to autoimmune diseases, peripartum cardiomyopathy, hypersensitivity reactions or transplantation rejections), metabolic disturbances causing myocarditis (including nutritional, endocrinologic and electrolyte abnormalities) and exposure to toxic agents causing myocarditis (including alcohol, as well as certain chemotherapeutic drugs and catecholamines). Thus Example 5 demonstrated the methods disclosed herein are useful for the treatment of subject with HF where the cause of disease remains unknown, and thus is useful to treat patients with “idiopathic dilated cardiomyopathy” (or “IDCM”).

### Example 6

[1311] In vivo treatment of human subjects with non-ischemic inherited cardiomyopathies.

[1312] Described in Example 5 is the treatment of subjects with heart failure due to non-ischemic cardiomyopathy. Example 6 herein describes a method of administrating a rAAV viral vector expressing the I-1c gene to human patients for the treatment of inherited cardiomyopathies causes and/or, cardiomyopathies associated with genetic mutation, according to the methods disclosed herein. Example 6 discusses administration of AAV2i8.sc-CMV.I1c as an exemplary rAAV, which is produced from the plasmid of SEQ ID NO: 441. The rAAV vector AAV2i8.sc-CMV.I1c discussed in Example 6 is an exemplary rAAV, and any rAAV disclosed herein can be used in the methods to treat heart failure from a variety of non-ischemic cardiomyopathies due to a variety of different causes, as disclosed herein. For example, one of ordinary skill in the art can readily substitute the CMV promoter in the AAV2i8.sc-CMV.I1c discussed in Example 6 for a cardiac-specific promoter, e.g, any cardiac specific promoter disclosed in Tables 2A or 5A or shown in FIGS. 7B-7O. Similarly, the AAV2i8.sc-CMV.I1c discussed in Example can be readily substituted for a rAAV comprising a codon-optimized nucleic acid sequence encoding I-1c, such as, but not limited to the nucleic acid sequences of SEQ ID NO: 385-412. Similarly, the AAV2i8.sc-CMV.I1c discussed in Example 6 can be readily substituted for a rAAV comprising a nucleic acid sequence of SEQ ID NO: 413-440, or modified version thereof. rAAV lacking bacterial sequence and comprising the AAV2i8.sc-CMV.I1c used in Example 6 can be manufactured from any of linear duplex DNA of SEQ ID NO: 357-384 and be used to treat variety of non-ischemic cardiomyopathies due to a variety of different causes including treating cardiomyopathy with patients having phospholamban mutation as discussed in this example.

[1313] Pathogenic mutations in the phospholamban (PLN) give rise to inherited cardiomyopathies due to its role in calcium homeostasis. Several PLN mutations have been identified, with the R14del mutation being the most prevalent cardiomyopathy-related mutation in the Netherlands. The R14del mutation in the PLN gene is present in patients diagnosed with arrhythmogenic cardiomyopathy as well as dilated cardiomyopathy. Patients with the R14del mutation are characterised by older age at onset, low-voltage electrocardiograms and a high frequency of ventricular arrhythmias. Additionally, these patients have a poor prognosis often with left ventricular dysfunction and early-onset heart failure (Hof et al., Prevalence and cardiac phenotype of patients with a phospholamban mutation. Neth Heart J. 2019 Feb;27(2):64-69; HofIE et al., Prevalence and cardiac phenotype of patients with a phospholamban mutation. Neth Heart J. 2019 Feb;27(2):64-69).

[1314] Human patients identified to have the R14del mutation in the PLN gene can be administered the AAV2i8.sc-CMV.I1c as disclosed herein. For example, patients from the Netherlands with arrhythmogenic cardiomyopathy and/or dilated cardiomyopathy and/or patients with the R14del mutation in the PLN gene can receive infusions of AAV2i8.sc-CMV.I1c, where the rAAV vector is AAV2i8, and which expresses the I-1c protein (amino acids 1-65 with the T35D modification) under the CMV promoter. A single intracoronary infusion of AAV2i8.sc-CMV.I1c will be administered to human patients with at least a NYHA Class III heart failure, where administration can occur as single administration of a total dose selected from any of: 3 × 10¹³ vg, 1 × 10¹⁴ vg, 3 × 10¹⁴ vg, 1 × 10¹⁵ vg, or 1 × 10¹⁵ vg. All the patients in the study will have been identified to have the R14del mutation in the PLN gene and have non-ischemic cardiomyopathy. In some patients, the total dose will be administered in a series of 5 sub-doses, each sub-dose administered from a separate syringe, and where the 5 sub-doses are administered to the subject over a period of about 25-30 minutes. In such instances, the total rAAV dose is diluted in 50 ml saline and administered as 5 sub-doses in 5 syringes, with 10 ml volume in each syringe. The administration will be performed over a time period of about 5 minutes for each of the five syringes, one syringe after another, with frequent stops checking the position of catheters in each coronary artery using contrast injections. All patients will be followed until 12 months post treatment intervention, and then undergo long-term follow-up via semi-structured telephone questionnaires every 6 months for an additional 24 months (+/- 30 days).

[1315] Before administration, and after 4-weeks (+/- 3 days), 6 months and 12-months post-administration, the patients will be assessed using a variety of physiological assessments. For example, echocardiographic assessments of LVEF, LVEVD, LVEDVI, VLESV, LVEVI, SpI and GLS and degree of mitral regurgitation can be assessed, as well as serum NT-proBNP levels, as well as secondary effects assessed to determine efficacy of the administration of the AAV2i8.sc-CMV.I1c rAAV vector. Secondary effects include, e.g., but are not limited to (i) Peak VO₂ assessed by cardiopulmonary exercise testing, (ii) 6-minute walk test (6MWT), (iii) New York Heart Association (NYHA) Classification, (iv), total number of days alive out-of-hospital (as well as total days out-of-hospital as a% of total days alive post study intervention) (v), Quality of Life at 6 and 12 months compared to baseline, (vi) Health related quality of life as assessed by Minnesota Living with Heart Failure Questionnaire (MLWHFQ). Patients can also be assessed at 12-months and long-term follow-up period (until month 36 post-intervention), or assessed for a need for cardiac transplantation, or left ventricular assist device (LVAD) implantation.

[1316] Primary outcome measures will be assessed, which include a change in Peak VO₂ and LVEF levels. To determine the Peak VO₂ change, the Peak VO₂ will be measured at 6- and 12-months post-administration as compared to the Peak VO₂ before, or at the time of administration (i.e., as compared to baseline), as determined by Cardiopulmonary exercise testing using a modified Bruce protocol. Other primary outcome measures that will be assessed are a change in echocardiographic assessment in Left Ventricular Ejection Fraction (LVEF) as compared to the LVEF measured at the time of administration or screening, or 18-24 hours post-administration, or 4-weeks, 6 months and 12 months post-administration as compared to the LVEF measured before or at the time of administration (e.g., baseline LVEF level).

[1317] Secondary outcome measures can also be assessed, which include a change in results from the 6MWT (6-minute walk test), measured at 6- and 12-months post administration as compared to the results from the 6MWT measured at, or before administration (i.e., as compared to the baseline). Secondary outcome measures of the analysis of% predicted in heart failure subjects as compared to normal subjects was also determined.

[1318] Based on the significant improvement in HF clinical parameters of non-ischemic cardiomyopathy patients in Example 5 detected at 6- or 12 months after administration of the AAV2i8.sc-CMV.I1c (e.g., improved clinical parameters, such as improved NYHA class, increased%EF, increased walk distance on 6MWT, decreased serum NT-pro BNP, increased peak VO2, increased LVEF, improved MWHF score, etc.), it is expected that patients with non-ischemic inherited cardiomyopathies, including non-ischemic cardiomyopathy due to a R14del mutation in the PLN gene will also have similar improvement in the HR clinical parameters at least 12-months post administration. Thus Example 5 and 6 suggests the methods disclosed herein are useful for the treatment of subject with HF where the cause of disease remains unknown, and thus is useful to treat patients with non-ischemic cardiomyopathy due a genetic disorder with a cardiac manifestation, or a familial cardiomyopathy (such as that associated with progressive muscular dystrophy, myotonic muscular dystrophy, Freidrich’s ataxia, and hereditary dilated cardiomyopathy, and others as disclosed herein).

### Example 7

[1319] In vivo treatment of human subjects with ischemic cardiomyopathy.

[1320] Described in Example 7 is the treatment of subjects with heart failure due to ischemic cardiomyopathy. Here Example 7 describes a method of administrating a rAAV viral vector expressing the I-1c gene to human patients for the treatment of heart failure from ischemic cardiomyopathy according to the methods disclosed herein. Example 7 discusses administration of AAV2i8.sc-CMV.I1c as an exemplary rAAV, which is produced from the plasmid of SEQ ID NO: 441. The rAAV vector AAV2i8.sc-CMV.I1c discussed in Example 7 is an exemplary rAAV, and any rAAV disclosed herein can be used in the methods to treat heart failure from a variety of non-ischemic cardiomyopathies due to a variety of different causes, as disclosed herein. For example, one of ordinary skill in the art can readily substitute the CMV promoter in the AAV2i8.sc-CMV.I1c discussed in Example 7 for a cardiac-specific promoter, e.g, any cardiac specific promoter disclosed in Tables 2A or 5A or shown in FIGS. 7B-7O. Similarly, the AAV2i8.sc-CMV.I1c discussed in Example can be readily substituted for a rAAV comprising a codon-optimized nucleic acid sequence encoding I-1c, such as, but not limited to the nucleic acid sequences of SEQ ID NO: 385-412. Similarly, the AAV2i8.sc-CMV.I1c discussed in Example 7 can be readily substituted for a rAAV comprising a nucleic acid sequence of SEQ ID NO: 413-440, or modified version thereof. rAAV lacking bacterial sequence and comprising the AAV2i8.sc-CMV.I1c used in Example 5 can be manufactured from any of linear duplex DNA of SEQ ID NO: 357-384 and be used to treat ischemic cardiomyopathy as discussed in this example.

[1321] All patients who were administered the AAV2i8.sc-CMV.I1c as disclosed herein had improvements in left ventricular wall motion abnormalities (as detected by an improvement in LVEF). In particular, one human patient who was administered the AAV2i8.sc-CMV.I1c as disclosed herein had heart failure due to a wall motion left ventricle heart abnormality. Central echocardiogram readings, including echocardiographic assessments of LVEF, LVEVD, LVEDVI, VLESV, LVEVI, SpI and GLS and degree of mitral regurgitation was assessed were taken before administration and at 1-month, 2-months, 3-months, 6-months, 9-months and 12-months post administration. There was a significant improvement in the echocardiogram readings, and in particular, a significant improvement in LVEF.

[1322] Based on the significant improvement in LVEF in all patients in Example 5, and a significant improvement in LVEF of one patient with left ventricular wall motion abnormalities, as detected at 6- or 12 months after administration of the AAV2i8.sc-CMV.I1c, it is expected that patients with ischemic cardiomyopathies will also have similar improvement in LVEF and other HR clinical parameters at least 12-months post administration. Thus Example 7 suggests the methods disclosed herein are useful for the treatment of subject with ischemic cardiomyopathy, and thus is useful to treat patients with ischemic cardiomyopathy, including patients with ischemic cardiomyopathy prior to the manifestation of heart failure symptoms or CHF symptoms. Accordingly, it is expected that patients with ischemic cardiomyopathies will also have similar improvement in the HR clinical parameters at least 12-months post administration, including patients with ischemic cardiomyopathy due to myocardial infarction (MI), infarction, tissue ischemia, cardiac ischemia, atherosclerosis or coronary artery disease (CAD).

[1323] As such, patients with ischemic cardiomyopathy can receive infusions of AAV2i8.sc-CMV.I1c, where the rAAV vector is AAV2i8, and which expresses the I-1c protein (amino acids 1-65 with the T35D modification) under the CMV promoter. A single intracoronary infusion of AAV2i8.sc-CMV.I1c will be administered to human patients with at least a NYHA Class III heart failure, where administration can occur as single administration of a total dose selected from any of: 3 × 10¹³ vg, 1 × 10¹⁴ vg, 3 × 10¹⁴ vg, 1 × 10¹⁵ vg, or 1 × 10¹⁵ vg. All the patients in the study will have been identified to have ischemic cardiomyopathy. In some patients, the total dose will be administered in a series of 5 sub-doses, each sub-dose administered from a separate syringe, and where the 5 sub-doses are administered to the subject over a period of about 25-30 minutes. In such instances, the total rAAV dose is diluted in 50 ml saline and administered as 5 sub-doses in 5 syringes, with 10 ml volume in each syringe. The administration will be performed over a time period of about 5 minutes for each of the five syringes, one syringe after another, with frequent stops checking the position of catheters in each coronary artery using contrast injections. All patients will be followed until 12 months post treatment intervention, and then undergo long-term follow-up via semi-structured telephone questionnaires every 6 months for an additional 24 months (+/- 30 days). In some instances, the subject can be administered a larger dose of rAAV as compared to the dose of rAAV administered to a subject identified to have non-ischemic cardiomyopathy. In some instances, the administration of the rAAV to a subject with ischemic cardiomyopathy will be by intracoronary injection, or a direct injection into the heart muscle tissue, including but not limited to the muscle of the left ventricle and/or the location of the myocardial infarct (MI). In some instances, the subject can also be administered an additional therapeutic agent to increase blood flow to the infarct region.

[1324] Before administration, and after 4-weeks (+/- 3 days), 6 months and 12-months post-administration, the patients will be assessed using a variety of physiological assessments. For example, echocardiographic assessments of LVEF, LVEVD, LVEDVI, VLESV, LVEVI, SpI and GLS and degree of mitral regurgitation can be assessed, as well as serum NT-proBNP levels, as well as secondary effects assessed to determine efficacy of the administration of the AAV2i8.sc-CMV.I1c rAAV vector. Secondary effects include, e.g., but are not limited to (i) Peak VO₂ assessed by cardiopulmonary exercise testing, (ii) 6-minute walk test (6MWT), (iii) New York Heart Association (NYHA) Classification, (iv), total number of days alive out-of-hospital (as well as total days out-of-hospital as a% of total days alive post study intervention) (v), Quality of Life at 6 and 12 months compared to baseline, (vi) Health related quality of life as assessed by Minnesota Living with Heart Failure Questionnaire (MLWHFQ). Patients can also be assessed at 12-months and long-term follow-up period (until month 36 post-intervention), or assessed for a need for cardiac transplantation, or left ventricular assist device (LVAD) implantation.

[1325] Primary outcome measures will be assessed, which include a change in Peak VO₂ and LVEF levels. To determine the Peak VO₂ change, the Peak VO₂ will be measured at 6- and 12-months post-administration as compared to the Peak VO₂ before, or at the time of administration (i.e., as compared to baseline), as determined by Cardiopulmonary exercise testing using a modified Bruce protocol. Other primary outcome measures that will be assessed are a change in echocardiographic assessment in Left Ventricular Ejection Fraction (LVEF) as compared to the LVEF measured at the time of administration or screening, or 18-24 hours post-administration, or 4-weeks, 6 months and 12 months post-administration as compared to the LVEF measured before or at the time of administration (e.g., baseline LVEF level).

[1326] Secondary outcome measures can also be assessed, which include a change in results from the 6MWT (6-minute walk test), measured at 6- and 12-months post administration as compared to the results from the 6MWT measured at, or before administration (i.e., as compared to the baseline). Secondary outcome measures of the analysis of% predicted in heart failure subjects as compared to normal subjects was also determined.

[1327] Based on the improvement of in Left Ventricular Ejection Fraction (LVEF) a determined by echocardiographic assessment after administration of the AAV2i8.sc-CMV.I1c in the patient that had heart failure due to a low motion left ventricle heart abnormality, it is expected that patients with ischemic cardiomyopathy will also have in improved Left Ventricular Ejection Fraction (LVEF) at least 12-months post administration.

### References

[1328] All references cited in the specification and the Examples are incorporated in their entirety by reference.

[1329] CARR, et al. “Type 1 phosphatase, a negative regulator of cardiac function.” Molecular and cellular biology 22.12 (2002): 4124-4135

[1330] DOKAINISH “Left ventricular diastolic function and dysfunction: Central role of echocardiography.” Global Cardiology Science & Practice, 3: 1-12 (2015)

[1331] GYÖNGYÖSI et al. “Porcine model of progressive cardiac hypertrophy and fibrosis with secondary postcapillary pulmonary hypertension.” Journal of Translation Medicine, 15(202): 1-15 (2017)

[1332] HIGGINS “Natriuretic peptide measurement in heart failure.” acutecaretesting.org: 1-7 (2017)

[1333] HOF et al., Prevalence and cardiac phenotype of patients with a phospholamban mutation. Neth Heart J. 2019 Feb;27(2):64-69.

[1334] HOF et al., Prevalence and cardiac phenotype of patients with a phospholamban mutation. Neth Heart J. 2019 Feb;27(2):64-69; HofIE et al., Prevalence and cardiac phenotype of patients with a phospholamban mutation. Neth Heart J. 2019 Feb;27(2):64-69.

[1335] ISHIKAWA et al. “Cardiac I-1c Overexpression With Reengineered AAV Improves Cardiac Function in Swine Ischemic Heart Failure.” The American Society of Gene & Cell Therapy, 22(12): 2038-2045, (2014).

[1336] ISHIKAWA et al. “Gene Transfer for Ischemic Heart Failure in a Preclinical Model.” Journal of Visualized Experiments, 51: 1-3 (2011).

[1337] KONERMANN et al. “Changes of the Left Ventricle after Myocardial Infarction-Estimation with Cine Magnetic Resonance Imagine during the First Six Months.” Clinical Cardiology, 20: 201-212 (1997).

[1338] PATHAK, et al. “Enhancement of cardiac function and suppression of heart failure progression by inhibition of protein phosphatase 1.” Circulation research 96.7 (2005): 756-766.

[1339] SWANK et al. “Modest Increase in Peak VO₂ Is Related to Better Clinical Outcomes in Chronic Heart Failure Patients: Results from Heart Failure and a Controlled Trial to Investigate Outcomes of Exercise Training.” American Heart Association, 579-585 (2012).

[1340] TAYLOR et al. “Diagnostic accuracy of point-of-care natriuretic peptide testing for chronic heart failure in ambulatory care: systematic review and meta-analysis.” Nuffield Department of Primary Care Health Sciences at University of Oxford: 1-14 (2018)

[1341] WATANABE et al. “Protein Phosphatase Inhibitor-1 Gene Therapy in a Swine Model of Nonischemic Heart Failure.” Journal of the American College of Cardiology, 70(14): 1744-1756 (2017).

The application's sequence listing, which the Patent Office published only in electronic form, follows.

SEQUENCE LISTING (532 sequences)

SEQ ID NO: 1 - protein, 171 aa, Homo sapiens
  aa of I-1 (full length)
MEQDNSPQKIQFTVPLLEPHLDPEAAEQIRRRRPTPATLVLTSDQSSPEIDEDRIPNPHLKSTLAMSPRQRKKMTRITPTMKELQMMVEHHLGQQQQGEEPEGAAESTGTQESRPPGIPDTEVESRLGTSGTAKKTAECIPKTHERGSKEPSTKEPSTHIPPLDSKGANSV

SEQ ID NO: 2 - DNA, 1839 bp, Homo sapiens
  DNA of I-1 (full length)
agtgtccccggagccgcgagctgggagcgctgtgccgggagccgggagccgagcgcgccgggctggggccggggccggagcggagcggagagggagcgcgcccgccccagccccgagtcccgccgccttccctcccgccgcagcgcgggcccaccggccgccgccccagccatggagcaagacaacagcccccaaaagatccagttcacggtcccgctgctggagccgcaccttgaccccgaggcggcggagcagattcggaggcgccgccccacccctgccaccctcgtgctgaccagtgaccagtcatccccagagatagatgaagaccggatccccaacccacatctcaagtccactttggcaatgtctccacggcaacggaagaagatgacaaggatcacacccacaatgaaagagctccagatgatggttgaacatcacctggggcaacagcagcaaggagaggaacctgagggggccgctgagagcacaggaacccaggagtcccgcccacctgggatcccagacacagaagtggagtcaaggctgggcacctctgggacagcaaaaaaaactgcagaatgcatccctaaaactcacgaaagaggcagtaaggaacccagcacaaaagaaccctcaacccatataccaccactggattccaagggagccaactcggtctgagagaggaggaggtatcttgggatcaagactgcagtttgggaatgcatggacaccggatttgtttcttattccttcacttttggggaaaatctcttgtttttaaaaagtgataaatttggtgttaggtccttggcactttccttcttttccaactgggagaatcctttctccctgccttcttgccctgccctctctgtagcccccaccctcctgccaagctgcctctgggaaggaagaaacaggagctaggcagaagccttgagcagggaagagttcttcccttagccctgactttacttgctgtgggaagagagatgagggtcagataggtgggaggactaacttccagggtgccaagaaggaagaaaagccccaggttctcttttcttattgaggaacgatccgaccacctcacaggcctgccctgcagctggaagactcggcgctctaaggcctgtgccgtgtccagctgtgactgtgcggtgggctccatctgctggacaaaaggggaactgcaccatggcacttggcccatgggaaagagggtgtggtggtgtgccaatacctcctcgcctgccctccaagccccagctgccttccttttggattcccaagcttcaggatgtgttccctcttccagctgtgggaccgctgtcccttatttcaacccgttagcaacaatggatagagaacacagtggctattaatgaagaggcccatgctggagactggaagggttcccttgtcctagacattgaggggcccagataagaccaaaaccaagcataagagaagaaactgtctcagatctcacggccaggcctctctcctgctgctgtttttgattttcccaggtagtgggagagaggaaaggagggaaggcaagattctttccccctccctgctgaagcatgtggtacagaggcaagagcagagcctgagaagcgtcaggtcccacttctgccatgcagctactatgagccctcggggcctcctcctgggcctcagcttgcccagatacatacctaaatatatatatatatatatgagggagaacgcctcacccagattttatcatgctggaaagagtgtatgtatgtgaagatgcttggtcaacttgtacccagtgaacacacaaaaaaaaaaaaaaaa

SEQ ID NO: 3 - DNA, 443 bp, Artificial Sequence
  Description of Artificial Sequence: Synthetic polynucleotide
  SP0067
cccttcagattaaaaataactgaggtaagggcctgggtaggggaggtggtgtgagacgctcctgtctctcctctatctgcccatcggccctttggggaggaggaatgtgcccaaggactaaaaaaaggccatggagccagaggggcgagggcaacagacctttcatgggcaaaccttggggccctgctgataaatacccgctctggtatttggggttctcctctataaatacccgctctggtatttggggttggcagctgttgcgggatcttgcagctgtcaggggaggggaggcgggggctgatgtcaggagggatacaaatagtgccgacggctgggggccctgtctcccctcgccgcatccactctccggccggccgcctgcccgccgcctcctccgtgcgcccgccagcctcgcccgcgccgtcaccgcggccgccacc

SEQ ID NO: 4 - DNA, 433 bp, Artificial Sequence
  Description of Artificial Sequence: Synthetic polynucleotide
  SP0075
cccttcagattaaaaataactgaggtaagggcctgggtaggggaggtggtgtgagacgctcctgtctctcctctatctgcccatcggccctttggggaggaggaatgtgcccaaggactaaaaaaaggccatggagccagaggggcgagggcaacagacctttcatgggcaaaccttggggccctgctgatttttaaagactgaggaattaggcacctgtcatttttgccagctggtgtagatgttaaaaattactgtcactcttccgcctgctactttattttgcacctgctgttacttgagttacaggcatttcacacatggtaatttaataaggttagttcccatgacacaccgcctgctgccacggccggccgtataaatagaggcgaggagcagctgggctctcttggcagtcaccgcggccgccacc

SEQ ID NO: 5 - DNA, 765 bp, Artificial Sequence
  Description of Artificial Sequence: Synthetic polynucleotide
  SP0424
ttctgactgggtcccttaccactgtctttgcaaatggcatttccattaacatttctatttctggccattaggggcacctaaagatttcccaccaagattgacagccactattttaagaaagtgcttttaaaaagccagtgcttttgctaagtttaaatctgactttctcaggggatgcttaaaagaaatacacagtttgtttgttttttttttaagaacctttgcaagttcaaaataacattccagaaggagtcactagaaaaacattcaagggaagagaaaaaaattgttttcgtttgtagcagacctggcttcatccaaatgttctatttgttttttactgcagggataaaagcagtctgggctttcacatgacagcatctggggctgcggcagagggtcgggtccgaagcgctgccttatcagcgtccccagccctgggaggtgacagctggctggcttgtgtcagcccctcgggcactcacgtatctccgtccgacgggtttaaaatagcaaaactctgaggccacacaatagcttgggcttatatgggctcctgtgggggaagggggagcacggagggggccggggccgctgctgccaaaatagcagctcacaagtgttgcattcctctctgggcgccgggcacattcctgctggctctgcccgccccggggtgggcgccggggggaccttaaagcctctgccccccaaggagcccttcccagacagccgccggcacccaccgctccgtgggacgccacc

SEQ ID NO: 6 - DNA, 631 bp, Artificial Sequence
  Description of Artificial Sequence: Synthetic polynucleotide
  SP0425
taagtgtgatgcacagtgcttgcattttcttgatacgttagtcatatgagagctgacaaagaaggaaaaagagcagcgatgtggtgcaatattaacaggcagctgtcccctggcttcccgatacgtgggatgactcgcattgctgagcggtgtggtcactgccaaaggaatgaccctctcacatttcttcctgattcgcatacgccgcggcgggataaaagcagtctgggctttcacatgacagcatctggggctgcggcagagggtcgggtccgaagcgctgccttatcagcgtccccagccctgggaggtgacagctggctggcttgtgtcagcccctcgggcactcacgtatctccgtccgacgggtttaaaatagcaaaactctgaggccacacaatagcttgggcttatatgggctcctgtgggggaagggggagcacggagggggccggggccgctgctgccaaaatagcagctcacaagtgttgcattcctctctgggcgccgggcacattcctgctggctctgcccgccccggggtgggcgccggggggaccttaaagcctctgccccccaaggagcccttcccagacagccgccggcacccaccgctccgtgggacgccacc

SEQ ID NO: 7 - DNA, 806 bp, Artificial Sequence
  Description of Artificial Sequence: Synthetic polynucleotide
  SP0429
aaactttaaagattagctattaaaaatgccattttacataaattaattggtttttatcagagtagtataatagtaaactactttttgtctaatgacttctgttcacaggtgaagtggtataatctgcccttgtttatatttttggttgtctgaataagatgggaaatatttttaatatgcaggggcagtagtgaggcaccaagattccatgcacttcctgtcagcaaaggtatcaactgccaggaacccctgataagtcctattttgagcaagcagtgtcaggataacagaagacagacacagtttactgctgtgaggctggcagcagagccaactgcactaccatcctaatcacaacagacactctggagttagacaaagccaaggggataaaagcagtctgggctttcacatgacagcatctggggctgcggcagagggtcgggtccgaagcgctgccttatcagcgtccccagccctgggaggtgacagctggctggcttgtgtcagcccctcgggcactcacgtatctccgtccgacgggtttaaaatagcaaaactctgaggccacacaatagcttgggcttatatgggctcctgtgggggaagggggagcacggagggggccggggccgctgctgccaaaatagcagctcacaagtgttgcattcctctctgggcgccgggcacattcctgctggctctgcccgccccggggtgggcgccggggggaccttaaagcctctgccccccaaggagcccttcccagacagccgccggcacccaccgctccgtgggacgccacc

SEQ ID NO: 8 - DNA, 842 bp, Artificial Sequence
  Description of Artificial Sequence: Synthetic polynucleotide
  SP0430
gaagcaacacatgccccttcccaaaaatatctagccagtgcctaatgccagattgtcaagtagaaagtctgtccagcagtgagacggaggtcgttctcctaatctgtcctgcattcccctgcactctaaaaggagatccaccaggccaggacaggcaagttggctctacacgtagctgcaaatagaagcagggctcaagccatccatagctcgactcacttactaaataaggatgaaacaataccgggttcacttctctgacacattcccctgtctacgacgagggctgggtggagagagcagggaagtccacagtgcactattgttagcctttatcaagaaacatgacaaatgaccctgaaatggagcctcttatcacccaaacctctccacagcctgcacaaggagcagctgcagtccatgggataaaagcagtctgggctttcacatgacagcatctggggctgcggcagagggtcgggtccgaagcgctgccttatcagcgtccccagccctgggaggtgacagctggctggcttgtgtcagcccctcgggcactcacgtatctccgtccgacgggtttaaaatagcaaaactctgaggccacacaatagcttgggcttatatgggctcctgtgggggaagggggagcacggagggggccggggccgctgctgccaaaatagcagctcacaagtgttgcattcctctctgggcgccgggcacattcctgctggctctgcccgccccggggtgggcgccggggggaccttaaagcctctgccccccaaggagcccttcccagacagccgccggcacccaccgctccgtgggacgccacc

SEQ ID NO: 9 - DNA, 460 bp, Artificial Sequence
  Description of Artificial Sequence: Synthetic polynucleotide
  SP0344
cccttcagattaaaaataactgaggtaagggcctgggtaggggaggtggtgtgagacgctcctgtctctcctctatctgcccatcggccctttggggaggaggaatgtgcccaaggactaaaaaaaggccatggagccagaggggcgagggcaacagacctttcatgggcaaaccttggggccctgctgggccccagccactgtctctttaaccttgaaggcatttttgggtctcacgtgtccacccaggcgggtgtcggactttgaacggctcttacttcagaagaacggcatggggtgggggggcttaggtggcctctgcctcacctacaactgccaaaagtggtcatggggttatttttaaccccagggaagaggtatttattgttccacagcaggggccggccagcaggctccttgaattcttcagaggcagcagccagcctcagacaccgccacc

SEQ ID NO: 10 - DNA, 554 bp, Artificial Sequence
  Description of Artificial Sequence: Synthetic polynucleotide
  SP0433
cccttcagattaaaaataactgaggtaagggcctgggtaggggaggtggtgtgagacgctcctgtctctcctctatctgcccatcggccctttggggaggaggaatgtgcccaaggactaaaaaaaggccatggagccagaggggcgagggcaacagacctttcatgggcaaaccttggggccctgctgcaccgcggtggcggccgtccgccctcggcaccatcctcacgacacccaaatatggcgacgggtgaggaatggtggggagttatttttagagcgtaaacgagctattagttgcagcaggtgttggcgctctaaaaataactcccgggagttatttttagagcggaggaatggtggacacccaaatatggcgacggttcctcacccgtcgccatatttgggtgtccgccctcggccggggccgcattcctgggggccgggcggtgctcccgcccgcctcgataaaaggctccggggccggcggcggcccacgagctacccggaggagcgggaggcgccaagctctagaactagtggatcccgccacc

SEQ ID NO: 11 - DNA, 609 bp, Artificial Sequence
  Description of Artificial Sequence: Synthetic polynucleotide
  SP0435
cccttcagattaaaaataactgaggtaagggcctgggtaggggaggtggtgtgagacgctcctgtctctcctctatctgcccatcggccctttggggaggaggaatgtgcccaaggactaaaaaaaggccatggagccagaggggcgagggcaacagacctttcatgggcaaaccttggggccctgctggggataaaagcagtctgggctttcacatgacagcatctggggctgcggcagagggtcgggtccgaagcgctgccttatcagcgtccccagccctgggaggtgacagctggctggcttgtgtcagcccctcgggcactcacgtatctccgtccgacgggtttaaaatagcaaaactctgaggccacacaatagcttgggcttatatgggctcctgtgggggaagggggagcacggagggggccggggccgctgctgccaaaatagcagctcacaagtgttgcattcctctctgggcgccgggcacattcctgctggctctgcccgccccggggtgggcgccggggggaccttaaagcctctgccccccaaggagcccttcccagacagccgccggcacccaccgctccgtgggacgccacc

SEQ ID NO: 12 - DNA, 632 bp, Artificial Sequence
  Description of Artificial Sequence: Synthetic polynucleotide
  SP0436
cccttcagattaaaaataactgaggtaagggcctgggtaggggaggtggtgtgagacgctcctgtctctcctctatctgcccatcggccctttggggaggaggaatgtgcccaaggactaaaaaaaggccatggagccagaggggcgagggcaacagacctttcatgggcaaaccttggggccctgctgcccttcagattaaaaataactgaggtaagggcctgggtaggggaggtggtgtgagacgctcctgtctctcctctatctgcccatcggccctttggggaggaggaatgtgcccaaggactaaaaaaaggccatggagccagaggggcgagggcaacagacctttcatgggcaaaccttggggccctgctgataaatacccgctctggtatttggggttctcctctataaatacccgctctggtatttggggttggcagctgttgcgggatcttgcagctgtcaggggaggggaggcgggggctgatgtcaggagggatacaaatagtgccgacggctgggggccctgtctcccctcgccgcatccactctccggccggccgcctgcccgccgcctcctccgtgcgcccgccagcctcgcccgcgccgtcaccgcggccgccacc

SEQ ID NO: 13 - DNA, 782 bp, Artificial Sequence
  Description of Artificial Sequence: Synthetic polynucleotide
  SP0449
ttctgactgggtcccttaccactgtctttgcaaatggcatttccattaacatttctatttctggccattaggggcacctaaagatttcccaccaagattgacagccactattttaagaaagtgcttttaaaaagccagtgcttttgctaagtttaaatctgactttctcaggggatgcttaaaagaaatacacagtttgtttgttttttttttaagaacctttgcaagttcaaaataacattccagaaggagtcactagaaaaacattcaagggaagagaaaaaaattgttttcgtttgtagcagacctggcttcatccaaatgttctatttgttttttactgcacccttcagattaaaaataactgaggtaagggcctgggtaggggaggtggtgtgagacgctcctgtctctcctctatctgcccatcggccctttggggaggaggaatgtgcccaaggactaaaaaaaggccatggagccagaggggcgagggcaacagacctttcatgggcaaaccttggggccctgctgataaatacccgctctggtatttggggttctcctctataaatacccgctctggtatttggggttggcagctgttgcgggatcttgcagctgtcaggggaggggaggcgggggctgatgtcaggagggatacaaatagtgccgacggctgggggccctgtctcccctcgccgcatccactctccggccggccgcctgcccgccgcctcctccgtgcgcccgccagcctcgcccgcgccgtcaccgccacc

SEQ ID NO: 14 - DNA, 823 bp, Artificial Sequence
  Description of Artificial Sequence: Synthetic polynucleotide
  SP0450
aaactttaaagattagctattaaaaatgccattttacataaattaattggtttttatcagagtagtataatagtaaactactttttgtctaatgacttctgttcacaggtgaagtggtataatctgcccttgtttatatttttggttgtctgaataagatgggaaatatttttaatatgcaggggcagtagtgaggcaccaagattccatgcacttcctgtcagcaaaggtatcaactgccaggaacccctgataagtcctattttgagcaagcagtgtcaggataacagaagacagacacagtttactgctgtgaggctggcagcagagccaactgcactaccatcctaatcacaacagacactctggagttagacaaagccaagcccttcagattaaaaataactgaggtaagggcctgggtaggggaggtggtgtgagacgctcctgtctctcctctatctgcccatcggccctttggggaggaggaatgtgcccaaggactaaaaaaaggccatggagccagaggggcgagggcaacagacctttcatgggcaaaccttggggccctgctgataaatacccgctctggtatttggggttctcctctataaatacccgctctggtatttggggttggcagctgttgcgggatcttgcagctgtcaggggaggggaggcgggggctgatgtcaggagggatacaaatagtgccgacggctgggggccctgtctcccctcgccgcatccactctccggccggccgcctgcccgccgcctcctccgtgcgcccgccagcctcgcccgcgccgtcaccgccacc

SEQ ID NO: 15 - DNA, 859 bp, Artificial Sequence
  Description of Artificial Sequence: Synthetic polynucleotide
  SP0451
gaagcaacacatgccccttcccaaaaatatctagccagtgcctaatgccagattgtcaagtagaaagtctgtccagcagtgagacggaggtcgttctcctaatctgtcctgcattcccctgcactctaaaaggagatccaccaggccaggacaggcaagttggctctacacgtagctgcaaatagaagcagggctcaagccatccatagctcgactcacttactaaataaggatgaaacaataccgggttcacttctctgacacattcccctgtctacgacgagggctgggtggagagagcagggaagtccacagtgcactattgttagcctttatcaagaaacatgacaaatgaccctgaaatggagcctcttatcacccaaacctctccacagcctgcacaaggagcagctgcagtccatcccttcagattaaaaataactgaggtaagggcctgggtaggggaggtggtgtgagacgctcctgtctctcctctatctgcccatcggccctttggggaggaggaatgtgcccaaggactaaaaaaaggccatggagccagaggggcgagggcaacagacctttcatgggcaaaccttggggccctgctgataaatacccgctctggtatttggggttctcctctataaatacccgctctggtatttggggttggcagctgttgcgggatcttgcagctgtcaggggaggggaggcgggggctgatgtcaggagggatacaaatagtgccgacggctgggggccctgtctcccctcgccgcatccactctccggccggccgcctgcccgccgcctcctccgtgcgcccgccagcctcgcccgcgccgtcaccgccacc

SEQ ID NO: 16 - DNA, 851 bp, Artificial Sequence
  Description of Artificial Sequence: Synthetic polynucleotide
  SP0452
gggataaaagcagtctgggctttcacatgacagcatctggggctgcggcagagggtcgggtccgaagcgctgccttatcagcgtccccagccctgggaggtgacagctggctggcttgtgtcagcccctcgggcactcacgtatctccgtccgacgggtttaaaatagcaaaactctgaggccacacaatagcttgggcttatatgggctcctgtgggggaagggggagcacggagggggccggggccgctgctgccaaaatagcagctcacaagtgttgcattcctctctgggcgccgggcacattcctgctggctctgcccgccccggggtgggcgccggggggaccttaaagcctctgccccccaaggagcccttcccagacagccgccggcacccaccgctccgtgggaccccttcagattaaaaataactgaggtaagggcctgggtaggggaggtggtgtgagacgctcctgtctctcctctatctgcccatcggccctttggggaggaggaatgtgcccaaggactaaaaaaaggccatggagccagaggggcgagggcaacagacctttcatgggcaaaccttggggccctgctgataaatacccgctctggtatttggggttctcctctataaatacccgctctggtatttggggttggcagctgttgcgggatcttgcagctgtcaggggaggggaggcgggggctgatgtcaggagggatacaaatagtgccgacggctgggggccctgtctcccctcgccgcatccactctccggccggccgcctgcccgccgcctcctccgtgcgcccgccagcctcgcccgcgccgtcaccgccacc

SEQ ID NO: 17 - DNA, 647 bp, Artificial Sequence
  Description of Artificial Sequence: Synthetic polynucleotide
  SP0475
cccttcagattaaaaataactgaggtaagggcctgggtaggggaggtggtgtgagacgctcctgtctctcctctatctgcccatcggccctttggggaggaggaatgtgcccaaggactaaaaaaaggccatggagccagaggggcgagggcaacagacctttcatgggcaaaccttggggccctgctgataaatacccgctctggtatttggggttctcctctataaatacccgctctggtatttggggttggcagctgttgcgggatcttgcagctgtcaggggaggggaggcgggggctgatgtcaggagggatacaaatagtgccgacggctgggggccctgtctcccctcgctcagatcgcctggagacgccatccacgctgttttgacctccatagaagacaccgggaccgatccagcctccgcggccgggaacggtgcattggaacgcggattccccgtgccaagagtgacgtaagtaccgcctatagactctataggcacacccctttggctcttatgcatgaacggtggagggcagtgtagtctgagcagtactcgttgctgccgcgcgcgccaccagacataatagctgacagactaacagactgttcctttccatgggtcttttctgcaggccacc

SEQ ID NO: 18 - DNA, 501 bp, Artificial Sequence
  Description of Artificial Sequence: Synthetic polynucleotide
  SP0476
ccagcagtttcatccctagaccatcccaaacatggttgagaagctctgaggggaggacccagcactgcccggcccctgaagtatctaatcagcagtcctgctcagcatatcaatccaagcccactctagacagagatgccggtgcccagttttctatttttaactggtgtgaactgaaggaaaagcacagcattagaagtccaagcactagtcaagaaccaagaatacagggcaccccagggcaagcataaatacccgctctggtatttggggttctcctctataaatacccgctctggtatttggggttggcagctgttgcgggatcttgcagctgtcaggggaggggaggcgggggctgatgtcaggagggatacaaatagtgccgacggctgggggccctgtctcccctcgccgcatccactctccggccggccgcctgcccgccgcctcctccgtgcgcccgccagcctcgcccgcgccgtcaccgcggccgccacc

SEQ ID NO: 19 - DNA, 484 bp, Artificial Sequence
  Description of Artificial Sequence: Synthetic polynucleotide
  SP0477
gtcaccctctgcttccctgcatgggtcctgttgccagggagaaagaatcctgaggcgagcgcccaggaagataaccaaggactcttttctgctcctctcacacctttgaagtgggggcctcttgaggcaaatcagcaagaatgtgactcttgcagctgagggtctgggggaggggggtgagtggagctgctcaaggcaaaggggccgtgacaagctttgccgaactgataataaatacccgctctggtatttggggttctcctctataaatacccgctctggtatttggggttggcagctgttgcgggatcttgcagctgtcaggggaggggaggcgggggctgatgtcaggagggatacaaatagtgccgacggctgggggccctgtctcccctcgccgcatccactctccggccggccgcctgcccgccgcctcctccgtgcgcccgccagcctcgcccgcgccgtcaccgcggccgccacc

SEQ ID NO: 20 - DNA, 465 bp, Artificial Sequence
  Description of Artificial Sequence: Synthetic polynucleotide
  SP0478
cctgggctcctggcatctgctttatcgggattctcaagagggacagctggtttatgttacaagcctgttccctgcatatctgctctggttttaaatagctttatctgagcagctggaggaccacatgagcttatatggcgtggggtacttgttcttttagccctgtgccgggcacctgccaaaatagcagccaacaccccccattgtgttgataaatacccgctctggtatttggggttctcctctataaatacccgctctggtatttggggttggcagctgttgcgggatcttgcagctgtcaggggaggggaggcgggggctgatgtcaggagggatacaaatagtgccgacggctgggggccctgtctcccctcgccgcatccactctccggccggccgcctgcccgccgcctcctccgtgcgcccgccagcctcgcccgcgccgtcaccgcggccgccacc

SEQ ID NO: 21 - DNA, 456 bp, Artificial Sequence
  Description of Artificial Sequence: Synthetic polynucleotide
  SP0479
ccagttgttcaactcacccttcagattaaaaataactgaggtaagggcctgggtaggggaggtggtgtgagacgctcctgtctctcctctatctgcccatcggccctttggggaggaggaatgtgcccaaggactaaaaaaaggccatggagccagaggggcgagggcaacagacctttcatgggcaaaccttggggccctgataaatacccgctctggtatttggggttctcctctataaatacccgctctggtatttggggttggcagctgttgcgggatcttgcagctgtcaggggaggggaggcgggggctgatgtcaggagggatacaaatagtgccgacggctgggggccctgtctcccctcgccgcatccactctccggccggccgcctgcccgccgcctcctccgtgcgcccgccagcctcgcccgcgccgtcaccgcggccgccacc

SEQ ID NO: 22 - DNA, 496 bp, Artificial Sequence
  Description of Artificial Sequence: Synthetic polynucleotide
  SP0480
tgctgagcccagaaaaactgaccgccctgtgtcctgcccacctccacactctagagctatattgagaggtgacagtagatagggtgggagctggtagcagggagagtgttcctgggtgtgagggtgtaggggaaagccagagcaggggagtctggctttgcctcctgaacacaatgtctacttagttataacaggcatgacctgctaaagacccaacatctacgacctctgaaaagacagcaataaatacccgctctggtatttggggttctcctctataaatacccgctctggtatttggggttggcagctgttgcgggatcttgcagctgtcaggggaggggaggcgggggctgatgtcaggagggatacaaatagtgccgacggctgggggccctgtctcccctcgccgcatccactctccggccggccgcctgcccgccgcctcctccgtgcgcccgccagcctcgcccgcgccgtcaccgcggccgccacc

SEQ ID NO: 23 - DNA, 456 bp, Artificial Sequence
  Description of Artificial Sequence: Synthetic polynucleotide
  SP0481
cccttcagattaaaaataactgaggtaagggcctgggtaggggaggtggtgtgagacgctcctgtctctcctctatctgcccatcggccctttggggaggaggaatgtgcccaaggactaaaaaaaggccatggagccagaggggcgagggcaacagacctttcatgggcaaaccttggggccctgctgtatgtctatattaggtgacgcagaactgcccgtcgctcctgtcatccaggcccctggcccaatggcaggctgaatcccccctactccagcctgctcccgcctcttctgcccctggtgctccgcgctacctgctgccgcgcgccacatccagggcagagaggcgggtgcgcgggcgggcggcgggcaccatgcggggaggctgtccccaggggtgggcagcaccactctctgctacccacctggcgctgtgaaacctgcgtcgccacc

SEQ ID NO: 24 - DNA, 517 bp, Artificial Sequence
  Description of Artificial Sequence: Synthetic polynucleotide
  SP0482
agcggagccgagggggcagcgcgtgaccccgagcggaagggccccagtctgggtcctaatgcgggtggcgtctctcttgacaggcagcgtttggggacaacagcggggaagggagataagatgacataccagagcagatttggtgtgcgcgctgatactcctggcccgacaggaaactcggagctatttaaaaaggccctatcgattactttatcttccccggaggaaaacttcttgccgagagacaaaagatgtccccctacataaatacccgctctggtatttggggttctcctctataaatacccgctctggtatttggggttggcagctgttgcgggatcttgcagctgtcaggggaggggaggcgggggctgatgtcaggagggatacaaatagtgccgacggctgggggccctgtctcccctcgccgcatccactctccggccggccgcctgcccgccgcctcctccgtgcgcccgccagcctcgcccgcgccgtcaccgcggccgccacc

SEQ ID NO: 25 - DNA, 453 bp, Artificial Sequence
  Description of Artificial Sequence: Synthetic polynucleotide
  SP0483
cccttcagattaaaaataactgaggtaagggcctgggtaggggaggtggtgtgagacgctcctgtctctcctctatctgcccatcggccctttggggaggaggaatgtgcccaaggactaaaaaaaggccatggagccagaggggcgagggcaacagacctttcatgggcaaaccttggggccctgctgggccccagccactgactctttaaccttgaaggcatttttgggtctcacgtgtccacccaggcgggtggccgcctttgagcagctcttacttcagaagaacggcatggagtggggggtggggggcttaggtggcctccgcctcacctacaactgccaaaagtggtcatggggttatttttaaccccaggggagaggtatttattgttccacagcaggggcagaggccagcaggctcctcgaactctccagaggtggcaagccacc

SEQ ID NO: 26 - DNA, 348 bp, Artificial Sequence
  Description of Artificial Sequence: Synthetic polynucleotide
  SP0484
cccttcagattaaaaataactgaggtaagggcctgggtaggggaggtggtgtgagacgctcctgtctctcctctatctgcccatcggccctttggggaggaggaatgtgcccaaggactaaaaaaaggccatggagccagaggggcgagggcaacagacctttcatgggcaaaccttggggccctgctggactcgctgaattaatgaatcacttttcttatctattttttgctgttatctaattctgagagggaagccgggagcagagggagttgggagacgtagctcacaacgtctccctcccacccggctcaaacaggctggaatctctgggcctagagggccacc

SEQ ID NO: 27 - DNA, 442 bp, Artificial Sequence
  Description of Artificial Sequence: Synthetic polynucleotide
  SP0485
cctctagaggcaggtgaccttgatgaaaggccttcagtgtgacacaggtgtaaaaatagcctctgtgctgacttaactccctggcttgagcaaacggcccctcacacctgtatattgtttgcttggcatagacacactgctacctgtttgcaggtgtaaatgactgtttatgtacccagagttatgagataaatacccgctctggtatttggggttctcctctataaatacccgctctggtatttggggttggcagctgttgcgggatcttgcagctgtcaggggaggggaggcgggggctgatgtcaggagggatacaaatagtgccgacggctgggggccctgtctcccctcgccgcatccactctccggccggccgcctgcccgccgcctcctccgtgcgcccgccagcctcgcccgcgccgtcaccgcggccgccacc

SEQ ID NO: 28 - DNA, 463 bp, Artificial Sequence
  Description of Artificial Sequence: Synthetic polynucleotide
  SP0486
cccttcagattaaaaataactgaggtaagggcctgggtaggggaggtggtgtgagacgctcctgtctctcctctatctgcccatcggccctttggggaggaggaatgtgcccaaggactaaaaaaaggccatggagccagaggggcgagggcaacagacctttcatgggcaaaccttggggccctgctggggctggctgaaaggatgtctatatgtgtatttttatcacccatgtgtcggatgagcctgagagctgccagatagctttctcgacagcttggcgttagtgttgggaacaggtccatgtatggaagcgaaagccgaaaggcacagataagctaagagccagctatgcagccatgcttagagacactaaggacaggctccccgggtcctttctttctggtctatctggagcagccttcagagctggtcggtttctcatccagcccatgcagccacc

SEQ ID NO: 29 - DNA, 337 bp, Artificial Sequence
  Description of Artificial Sequence: Synthetic polynucleotide
  SP0487
cccttcagattaaaaataactgaggtaagggcctgggtaggggaggtggtgtgagacgctcctgtctctcctctatctgcccatcggccctttggggaggaggaatgtgcccaaggactaaaaaaaggccatggagccagaggggcgagggcaacagacctttcatgggcaaaccttggggccctgctgaagatacctcagctggatggaatttgtctatatttagcaggtggctagcaggaggctgataagcagggctggggagggggcagtcctcataaatagtgagaacacaggacactgttcagtccctccttgggtggcctgcttggccacc

SEQ ID NO: 30 - DNA, 544 bp, Artificial Sequence
  Description of Artificial Sequence: Synthetic polynucleotide
  SP0488
taagtgtgatgcacagtgcttgcattttcttgatacgttagtcatatgagagctgacaaagaaggaaaaagagcagcgatgtggtgcaatattaacaggcagctgtcccctggcttcccgatacgtgggatgactcgcattgctgagcggtgtggtcactgccaaaggaatgaccctctcacatttcttcctgattcgcatacgccgcggccagcttgtcatctccctcttgggcttcccagacactaagtctggaatgaaaattcacctgcctctgaattggccactggataaatacccgctctggtatttggggttctcctctataaatacccgctctggtatttggggttggcagctgttgcgggatcttgcagctgtcaggggaggggaggcgggggctgatgtcaggagggatacaaatagtgccgacggctgggggccctgtctcccctcgccgcatccactctccggccggccgcctgcccgccgcctcctccgtgcgcccgccagcctcgcccgcgccgtcaccgcggccgccacc

SEQ ID NO: 31 - DNA, 553 bp, Artificial Sequence
  Description of Artificial Sequence: Synthetic polynucleotide
  SP0489
cccttcagattaaaaataactgaggtaagggcctgggtaggggaggtggtgtgagacgctcctgtctctcctctatctgcccatcggccctttggggaggaggaatgtgcccaaggactaaaaaaaggccatggagccagaggggcgagggcaacagacctttcatgggcaaaccttggggccctgctggtctagactcttggatttgagagaagagggaccttgctccgggttttcctaagtttgagggaggagggagctggggcgctagagtcaaaggaggaggggtgtagatcctgggcaccttggttgacccaactggagctttgcacacggctcccctcacaccctgttatcgcttatcctgggcaggggaggagacagcagtatatttagtctttgtcctcgccccttatctcagtgtcctcagtgaggcttgagcagcccagaggaaacccaacctctagagacctccaaggtcaccagggacacccttccaggaccctccaggaatctccgatcctgttctctgcctctggagatcatcgccacc

SEQ ID NO: 32 - DNA, 497 bp, Artificial Sequence
  Description of Artificial Sequence: Synthetic polynucleotide
  SP0490
gtcaccctctgcttccctgcatgggtcctgttgccagggagaaagaatcctgaggcgagcgcccaggaagataaccaaggactcttttctgctcctctcacacctttgaagtgggggcctcttgaggcaaatcagcaagaatgtgactcttgcagctgagggtctgggggaggggggtgagtggagctgctcaaggcaaaggggccgtgacaagctttgccgaactgatatatgtctatattaggtgacgcagaactgcccgtcgctcctgtcatccaggcccctggcccaatggcaggctgaatcccccctactccagcctgctcccgcctcttctgcccctggtgctccgcgctacctgctgccgcgcgccacatccagggcagagaggcgggtgcgcgggcgggcggcgggcaccatgcggggaggctgtccccaggggtgggcagcaccactctctgctacccacctggcgctgtgaaacctgcgtcgccacc

SEQ ID NO: 33 - DNA, 478 bp, Artificial Sequence
  Description of Artificial Sequence: Synthetic polynucleotide
  SP0491
cctgggctcctggcatctgctttatcgggattctcaagagggacagctggtttatgttacaagcctgttccctgcatatctgctctggttttaaatagctttatctgagcagctggaggaccacatgagcttatatggcgtggggtacttgttcttttagccctgtgccgggcacctgccaaaatagcagccaacaccccccattgtgttgtatgtctatattaggtgacgcagaactgcccgtcgctcctgtcatccaggcccctggcccaatggcaggctgaatcccccctactccagcctgctcccgcctcttctgcccctggtgctccgcgctacctgctgccgcgcgccacatccagggcagagaggcgggtgcgcgggcgggcggcgggcaccatgcggggaggctgtccccaggggtgggcagcaccactctctgctacccacctggcgctgtgaaacctgcgtcgccacc

SEQ ID NO: 34 - DNA, 378 bp, Artificial Sequence
  Description of Artificial Sequence: Synthetic polynucleotide
  SP0492
gtcaccctctgcttccctgcatgggtcctgttgccagggagaaagaatcctgaggcgagcgcccaggaagataaccaaggactcttttctgctcctctcacacctttgaagtgggggcctcttgaggcaaatcagcaagaatgtgactcttgcagctgagggtctgggggaggggggtgagtggagctgctcaaggcaaaggggccgtgacaagctttgccgaactgataaagatacctcagctggatggaatttgtctatatttagcaggtggctagcaggaggctgataagcagggctggggagggggcagtcctcataaatagtgagaacacaggacactgttcagtccctccttgggtggcctgcttggccacc

SEQ ID NO: 35 - DNA, 359 bp, Artificial Sequence
  Description of Artificial Sequence: Synthetic polynucleotide
  SP0493
cctgggctcctggcatctgctttatcgggattctcaagagggacagctggtttatgttacaagcctgttccctgcatatctgctctggttttaaatagctttatctgagcagctggaggaccacatgagcttatatggcgtggggtacttgttcttttagccctgtgccgggcacctgccaaaatagcagccaacaccccccattgtgttgaagatacctcagctggatggaatttgtctatatttagcaggtggctagcaggaggctgataagcagggctggggagggggcagtcctcataaatagtgagaacacaggacactgttcagtccctccttgggtggcctgcttggccacc

SEQ ID NO: 36 - DNA, 545 bp, Artificial Sequence
  Description of Artificial Sequence: Synthetic polynucleotide
  SP0494
aaacttaagtgctgaagatagcacttgcctggttctattttagtaggtccctggcagccagtcagcaagtgcagttgctcaagtgtgcttttggatcattgagtttcgtgtactggccatatcaggacaaggagaggccatgggaaaaaatagtccagcatctgatagtgtcaggtagtgttatccctgtcagggtgacagttgaagtgtttgagtaatagcagtgtcagcagatgcccagagtttaacatgtactcacttcaaaagggacagctgatctaagtgctggatataaatacccgctctggtatttggggttctcctctataaatacccgctctggtatttggggttggcagctgttgcgggatcttgcagctgtcaggggaggggaggcgggggctgatgtcaggagggatacaaatagtgccgacggctgggggccctgtctcccctcgccgcatccactctccggccggccgcctgcccgccgcctcctccgtgcgcccgccagcctcgcccgcgccgtcaccgcggccgccacc

SEQ ID NO: 37 - DNA, 567 bp, Artificial Sequence
  Description of Artificial Sequence: Synthetic polynucleotide
  SP0495
gtcaccctctgcttccctgcatgggtcctgttgccagggagaaagaatcctgaggcgagcgcccaggaagataaccaaggactcttttctgctcctctcacacctttgaagtgggggcctcttgaggcaaatcagcaagaatgtgactcttgcagctgagggtctgggggaggggggtgagtggagctgctcaaggcaaaggggccgtgacaagctttgccgaactgatacccttcagattaaaaataactgaggtaagggcctgggtaggggaggtggtgtgagacgctcctgtctctcctctatctgcccatcggccctttggggaggaggaatgtgcccaaggactaaaaaaaggccatggagccagaggggcgagggcaacagacctttcatgggcaaaccttggggccctgctgaagatacctcagctggatggaatttgtctatatttagcaggtggctagcaggaggctgataagcagggctggggagggggcagtcctcataaatagtgagaacacaggacactgttcagtccctccttgggtggcctgcttggccacc

SEQ ID NO: 38 - DNA, 548 bp, Artificial Sequence
  Description of Artificial Sequence: Synthetic polynucleotide
  SP0496
cctgggctcctggcatctgctttatcgggattctcaagagggacagctggtttatgttacaagcctgttccctgcatatctgctctggttttaaatagctttatctgagcagctggaggaccacatgagcttatatggcgtggggtacttgttcttttagccctgtgccgggcacctgccaaaatagcagccaacaccccccattgtgttgcccttcagattaaaaataactgaggtaagggcctgggtaggggaggtggtgtgagacgctcctgtctctcctctatctgcccatcggccctttggggaggaggaatgtgcccaaggactaaaaaaaggccatggagccagaggggcgagggcaacagacctttcatgggcaaaccttggggccctgctgaagatacctcagctggatggaatttgtctatatttagcaggtggctagcaggaggctgataagcagggctggggagggggcagtcctcataaatagtgagaacacaggacactgttcagtccctccttgggtggcctgcttggccacc

SEQ ID NO: 39 - DNA, 345 bp, Artificial Sequence
  Description of Artificial Sequence: Synthetic polynucleotide
  CRE0004
ttctgactgggtcccttaccactgtctttgcaaatggcatttccattaacatttctatttctggccattaggggcacctaaagatttcccaccaagattgacagccactattttaagaaagtgcttttaaaaagccagtgcttttgctaagtttaaatctgactttctcaggggatgcttaaaagaaatacacagtttgtttgttttttttttaagaacctttgcaagttcaaaataacattccagaaggagtcactagaaaaacattcaagggaagagaaaaaaattgttttcgtttgtagcagacctggcttcatccaaatgttctatttgttttttactgca

SEQ ID NO: 40 - DNA, 211 bp, Artificial Sequence
  Description of Artificial Sequence: Synthetic polynucleotide
  CRE0028
taagtgtgatgcacagtgcttgcattttcttgatacgttagtcatatgagagctgacaaagaaggaaaaagagcagcgatgtggtgcaatattaacaggcagctgtcccctggcttcccgatacgtgggatgactcgcattgctgagcggtgtggtcactgccaaaggaatgaccctctcacatttcttcctgattcgcatacgccgcggc

SEQ ID NO: 41 - DNA, 189 bp, Artificial Sequence
  Description of Artificial Sequence: Synthetic polynucleotide
  CRE0033
cccttcagattaaaaataactgaggtaagggcctgggtaggggaggtggtgtgagacgctcctgtctctcctctatctgcccatcggccctttggggaggaggaatgtgcccaaggactaaaaaaaggccatggagccagaggggcgagggcaacagacctttcatgggcaaaccttggggccctgctg

SEQ ID NO: 42 - DNA, 105 bp, Artificial Sequence
  Description of Artificial Sequence: Synthetic polynucleotide
  CRE0070
cggccggggccgcattcctgggggccgggcggtgctcccgcccgcctcgataaaaggctccggggccggcggcggcccacgagctacccggaggagcgggaggcg

SEQ ID NO: 43 - DNA, 229 bp, Artificial Sequence
  Description of Artificial Sequence: Synthetic polynucleotide
  CRE0071.3
caccgcggtggcggccgtccgccctcggcaccatcctcacgacacccaaatatggcgacgggtgaggaatggtggggagttatttttagagcgtaaacgagctattagttgcagcaggtgttggcgctctaaaaataactcccgggagttatttttagagcggaggaatggtggacacccaaatatggcgacggttcctcacccgtcgccatatttgggtgtccgccct

SEQ ID NO: 44 - DNA, 386 bp, Artificial Sequence
  Description of Artificial Sequence: Synthetic polynucleotide
  CRE0095
aaactttaaagattagctattaaaaatgccattttacataaattaattggtttttatcagagtagtataatagtaaactactttttgtctaatgacttctgttcacaggtgaagtggtataatctgcccttgtttatatttttggttgtctgaataagatgggaaatatttttaatatgcaggggcagtagtgaggcaccaagattccatgcacttcctgtcagcaaaggtatcaactgccaggaacccctgataagtcctattttgagcaagcagtgtcaggataacagaagacagacacagtttactgctgtgaggctggcagcagagccaactgcactaccatcctaatcacaacagacactctggagttagacaaagccaag

SEQ ID NO: 45 - DNA, 422 bp, Artificial Sequence
  Description of Artificial Sequence: Synthetic polynucleotide
  CRE0096
gaagcaacacatgccccttcccaaaaatatctagccagtgcctaatgccagattgtcaagtagaaagtctgtccagcagtgagacggaggtcgttctcctaatctgtcctgcattcccctgcactctaaaaggagatccaccaggccaggacaggcaagttggctctacacgtagctgcaaatagaagcagggctcaagccatccatagctcgactcacttactaaataaggatgaaacaataccgggttcacttctctgacacattcccctgtctacgacgagggctgggtggagagagcagggaagtccacagtgcactattgttagcctttatcaagaaacatgacaaatgaccctgaaatggagcctcttatcacccaaacctctccacagcctgcacaaggagcagctgcagtccat

SEQ ID NO: 46 - DNA, 247 bp, Artificial Sequence
  Description of Artificial Sequence: Synthetic polynucleotide
  CRE0105
ccagcagtttcatccctagaccatcccaaacatggttgagaagctctgaggggaggacccagcactgcccggcccctgaagtatctaatcagcagtcctgctcagcatatcaatccaagcccactctagacagagatgccggtgcccagttttctatttttaactggtgtgaactgaaggaaaagcacagcattagaagtccaagcactagtcaagaaccaagaatacagggcaccccagggcaagc

SEQ ID NO: 47 - DNA, 230 bp, Artificial Sequence
  Description of Artificial Sequence: Synthetic polynucleotide
  CRE0106
gtcaccctctgcttccctgcatgggtcctgttgccagggagaaagaatcctgaggcgagcgcccaggaagataaccaaggactcttttctgctcctctcacacctttgaagtgggggcctcttgaggcaaatcagcaagaatgtgactcttgcagctgagggtctgggggaggggggtgagtggagctgctcaaggcaaaggggccgtgacaagctttgccgaactgata

SEQ ID NO: 48 - DNA, 211 bp, Artificial Sequence
  Description of Artificial Sequence: Synthetic polynucleotide
  CRE0107
cctgggctcctggcatctgctttatcgggattctcaagagggacagctggtttatgttacaagcctgttccctgcatatctgctctggttttaaatagctttatctgagcagctggaggaccacatgagcttatatggcgtggggtacttgttcttttagccctgtgccgggcacctgccaaaatagcagccaacaccccccattgtgttg

SEQ ID NO: 49 - DNA, 202 bp, Artificial Sequence
  Description of Artificial Sequence: Synthetic polynucleotide
  CRE0108
ccagttgttcaactcacccttcagattaaaaataactgaggtaagggcctgggtaggggaggtggtgtgagacgctcctgtctctcctctatctgcccatcggccctttggggaggaggaatgtgcccaaggactaaaaaaaggccatggagccagaggggcgagggcaacagacctttcatgggcaaaccttggggccctg

SEQ ID NO: 50 - DNA, 242 bp, Artificial Sequence
  Description of Artificial Sequence: Synthetic polynucleotide
  CRE0109
tgctgagcccagaaaaactgaccgccctgtgtcctgcccacctccacactctagagctatattgagaggtgacagtagatagggtgggagctggtagcagggagagtgttcctgggtgtgagggtgtaggggaaagccagagcaggggagtctggctttgcctcctgaacacaatgtctacttagttataacaggcatgacctgctaaagacccaacatctacgacctctgaaaagacagca

SEQ ID NO: 51 - DNA, 263 bp, Artificial Sequence
  Description of Artificial Sequence: Synthetic polynucleotide
  CRE0111
agcggagccgagggggcagcgcgtgaccccgagcggaagggccccagtctgggtcctaatgcgggtggcgtctctcttgacaggcagcgtttggggacaacagcggggaagggagataagatgacataccagagcagatttggtgtgcgcgctgatactcctggcccgacaggaaactcggagctatttaaaaaggccctatcgattactttatcttccccggaggaaaacttcttgccgagagacaaaagatgtccccctac

SEQ ID NO: 52 - DNA, 188 bp, Artificial Sequence
  Description of Artificial Sequence: Synthetic polynucleotide
  CRE0114
cctctagaggcaggtgaccttgatgaaaggccttcagtgtgacacaggtgtaaaaatagcctctgtgctgacttaactccctggcttgagcaaacggcccctcacacctgtatattgtttgcttggcatagacacactgctacctgtttgcaggtgtaaatgactgtttatgtacccagagttatgag

SEQ ID NO: 53 - DNA, 290 bp, Artificial Sequence
  Description of Artificial Sequence: Synthetic polynucleotide
  CRE0117
taagtgtgatgcacagtgcttgcattttcttgatacgttagtcatatgagagctgacaaagaaggaaaaagagcagcgatgtggtgcaatattaacaggcagctgtcccctggcttcccgatacgtgggatgactcgcattgctgagcggtgtggtcactgccaaaggaatgaccctctcacatttcttcctgattcgcatacgccgcggccagcttgtcatctccctcttgggcttcccagacactaagtctggaatgaaaattcacctgcctctgaattggccactgg

SEQ ID NO: 54 - DNA, 291 bp, Artificial Sequence
  Description of Artificial Sequence: Synthetic polynucleotide
  CRE0118
aaacttaagtgctgaagatagcacttgcctggttctattttagtaggtccctggcagccagtcagcaagtgcagttgctcaagtgtgcttttggatcattgagtttcgtgtactggccatatcaggacaaggagaggccatgggaaaaaatagtccagcatctgatagtgtcaggtagtgttatccctgtcagggtgacagttgaagtgtttgagtaatagcagtgtcagcagatgcccagagtttaacatgtactcacttcaaaagggacagctgatctaagtgctggat

SEQ ID NO: 55 - DNA, 242 bp, Artificial Sequence
  Description of Artificial Sequence: Synthetic polynucleotide
  SKM_18
ataaatacccgctctggtatttggggttctcctctataaatacccgctctggtatttggggttggcagctgttgcgggatcttgcagctgtcaggggaggggaggcgggggctgatgtcaggagggatacaaatagtgccgacggctgggggccctgtctcccctcgccgcatccactctccggccggccgcctgcccgccgcctcctccgtgcgcccgccagcctcgcccgcgccgtcacc

SEQ ID NO: 56 - DNA, 232 bp, Artificial Sequence
  Description of Artificial Sequence: Synthetic polynucleotide
  SKM_20
atttttaaagactgaggaattaggcacctgtcatttttgccagctggtgtagatgttaaaaattactgtcactcttccgcctgctactttattttgcacctgctgttacttgagttacaggcatttcacacatggtaatttaataaggttagttcccatgacacaccgcctgctgccacggccggccgtataaatagaggcgaggagcagctgggctctcttggcagtcacc

SEQ ID NO: 57 - DNA, 414 bp, Artificial Sequence
  Description of Artificial Sequence: Synthetic polynucleotide
  CRE0082
gggataaaagcagtctgggctttcacatgacagcatctggggctgcggcagagggtcgggtccgaagcgctgccttatcagcgtccccagccctgggaggtgacagctggctggcttgtgtcagcccctcgggcactcacgtatctccgtccgacgggtttaaaatagcaaaactctgaggccacacaatagcttgggcttatatgggctcctgtgggggaagggggagcacggagggggccggggccgctgctgccaaaatagcagctcacaagtgttgcattcctctctgggcgccgggcacattcctgctggctctgcccgccccggggtgggcgccggggggaccttaaagcctctgccccccaaggagcccttcccagacagccgccggcacccaccgctccgtgggac

SEQ ID NO: 58 - DNA, 358 bp, Artificial Sequence
  Description of Artificial Sequence: Synthetic polynucleotide
  CRE0104
gtctagactcttggatttgagagaagagggaccttgctccgggttttcctaagtttgagggaggagggagctggggcgctagagtcaaaggaggaggggtgtagatcctgggcaccttggttgacccaactggagctttgcacacggctcccctcacaccctgttatcgcttatcctgggcaggggaggagacagcagtatatttagtctttgtcctcgccccttatctcagtgtcctcagtgaggcttgagcagcccagaggaaacccaacctctagagacctccaaggtcaccagggacacccttccaggaccctccaggaatctccgatcctgttctctgcctctggagatcatc

SEQ ID NO: 59 - DNA, 267 bp, Artificial Sequence
  Description of Artificial Sequence: Synthetic polynucleotide
  CRE0110
tatgtctatattaggtgacgcagaactgcccgtcgctcctgtcatccaggcccctggcccaatggcaggctgaatcccccctactccagcctgctcccgcctcttctgcccctggtgctccgcgctacctgctgccgcgcgccacatccagggcagagaggcgggtgcgcgggcgggcggcgggcaccatgcggggaggctgtccccaggggtgggcagcaccactctctgctacccacctggcgctgtgaaacctgcgtcgccacc

SEQ ID NO: 60 - DNA, 258 bp, Artificial Sequence
  Description of Artificial Sequence: Synthetic polynucleotide
  CRE0112
ggccccagccactgactctttaaccttgaaggcatttttgggtctcacgtgtccacccaggcgggtggccgcctttgagcagctcttacttcagaagaacggcatggagtggggggtggggggcttaggtggcctccgcctcacctacaactgccaaaagtggtcatggggttatttttaaccccaggggagaggtatttattgttccacagcaggggcagaggccagcaggctcctcgaactctccagaggtggcaa

SEQ ID NO: 61 - DNA, 153 bp, Artificial Sequence
  Description of Artificial Sequence: Synthetic polynucleotide
  CRE0113
gactcgctgaattaatgaatcacttttcttatctattttttgctgttatctaattctgagagggaagccgggagcagagggagttgggagacgtagctcacaacgtctccctcccacccggctcaaacaggctggaatctctgggcctagagg

SEQ ID NO: 62 - DNA, 268 bp, Artificial Sequence
  Description of Artificial Sequence: Synthetic polynucleotide
  CRE0115
gggctggctgaaaggatgtctatatgtgtatttttatcacccatgtgtcggatgagcctgagagctgccagatagctttctcgacagcttggcgttagtgttgggaacaggtccatgtatggaagcgaaagccgaaaggcacagataagctaagagccagctatgcagccatgcttagagacactaaggacaggctccccgggtcctttctttctggtctatctggagcagccttcagagctggtcggtttctcatccagcccatgca

SEQ ID NO: 63 - DNA, 142 bp, Artificial Sequence
  Description of Artificial Sequence: Synthetic polynucleotide
  CRE0116
aagatacctcagctggatggaatttgtctatatttagcaggtggctagcaggaggctgataagcagggctggggagggggcagtcctcataaatagtgagaacacaggacactgttcagtccctccttgggtggcctgcttg

SEQ ID NO: 64 - DNA, 265 bp, Artificial Sequence
  Description of Artificial Sequence: Synthetic polynucleotide
  CRE0038
ggccccagccactgtctctttaaccttgaaggcatttttgggtctcacgtgtccacccaggcgggtgtcggactttgaacggctcttacttcagaagaacggcatggggtgggggggcttaggtggcctctgcctcacctacaactgccaaaagtggtcatggggttatttttaaccccagggaagaggtatttattgttccacagcaggggccggccagcaggctccttgaattcttcagaggcagcagccagcctcagacacc

SEQ ID NO: 65 - DNA, 284 bp, Human betaherpesvirus 5
  CMV-IE 5-UTR and intron
tcagatcgcctggagacgccatccacgctgttttgacctccatagaagacaccgggaccgatccagcctccgcggccgggaacggtgcattggaacgcggattccccgtgccaagagtgacgtaagtaccgcctatagactctataggcacacccctttggctcttatgcatgaacggtggagggcagtgtagtctgagcagtactcgttgctgccgcgcgcgccaccagacataatagctgacagactaacagactgttcctttccatgggtcttttctgcag

SEQ ID NO: 66 - DNA, 196 bp, Homo sapiens
  hGH poly A
gatctgtggcttctagctgcccgggtggcatccctgtgacccctccccagtgcctctcctggccctggaagttgccactccagtgcccaccagccttgtcctaataaaattaagttgcatcattttgtctgactaggtgtccttctataatattatggggtggaggggggtggtatggagcaaggggcaagttggg

SEQ ID NO: 67 - DNA, 300 bp, Artificial Sequence
  Description of Artificial Sequence: Synthetic polynucleotide
  Exemplary stuffer sequence 1
taggcgcctctgacttcctggggattgacctgagttctactctagcgtttgctggttcggtgaactaatctgtgagatccccaactctccgtttgggatctccactctctggtgtcctaaccttggtgccccactgtctactgctagtgagaccttacgcgctgagaaacgtggcgttactctaactaagcgacgcgcacttgcactctgaatacttctaccgtaactaaccccggacctcagaactcagacggatctacgctgtccatcaacaccagacttagattacctctgttaagt

SEQ ID NO: 68 - DNA, 2032 bp, Artificial Sequence
  Description of Artificial Sequence: Synthetic polynucleotide
  Exemplary stuffer sequence 2
aagtgccgacccgtctgaatagtagatcccgtcgagggcttgaatctatcaccatagagtacacccatagagaatagctagctctcaattgactaaggactaaacttggtatttcgactgaagcctgtcactcctcactgttggcgctagtgaggagagttcgtagaaaggatagtacgatttaagtatctctaagccttgtgaagcactaaggttgcgtacagacgtgcttgaattacggataattcgtggaaccttgggatagtgcgcctctgacttctctgtgggtattgacctgagttctactctagcgtttgctggttcgtgtgaactaatctgtgagatcctcacaactctccgtttgggatctccactctctggtgtcctaacacttggtgccacacactgtctactgctagtgagaccttatctgtctgctgagaaactgtgtgctgttactctaactaagcgatctgtctgcacttgcactctgaatacttctaccgtaactaactctcacggactctcagaactcagacggatctactgctgtctcaaatcaacaccagacttagattactctctgttaagttgaaagactctctacaaatccacactgtggtctagttgaacaagcttgagagagtatctgtctgcatatcaagagtgagagtgtctctggatttggagtagttgagaagtggaaccatagcgagtctactgcctgtgtcaacttcaattagagtgttgaatagaggactgactctcgaattgaagtatcctgccaactgtctcaacttaattcaaacgctattttcgttaactgtctcaactctcgtcaagttgagaggaagagtagagccatagtttgaagcctgataagagttcgtctgaggacgtattgtgtgtcaagacgaactgaaggatttcaacaaatagagaagcttgacactgtccttcaactgtctgaactgtagcactctggatagctagctagcgtttgtagatagtttcaaggatagcaaccaacaacacgatagtttagaaattgttctagatcttctgctactactcgagagatagttgacttctagaagactctggatagagagcttcctgtggtttctatttcaacacttctgagcgatttagatagaggcgtcaattgagaacaaaaactggacacctgtttctagaacactagtgctagtcttctcaaggcttgatactgtcctgccactcaagagaaatgttctggcacctgcacttgcactggggacagcctattttgctagtttgttttgtttcgttttgttttgatggagagcgtatgttagtactatcgattcacacaaaaaaccaacacacagatgtaatgaaaataaagatattttattagagagcgagtggatagtttagagtcgcttgagacttatcctgtgtccaactagccaagagtagagagagagtgactaggtggatcgagagatcgtcgtctatttgactgctagcctgtgttctcgtcgtagtccaaatcttcaatactctggcgactagtaacttgaatctgtgtatctaacacgacaaggctactcctttgagtttctagtgataagtgcgactggatctagctagttgagtttctagaaactactgtccaaagctactagcactaaggtctctctgtgaaagagtggtctacttttgaggagaagaaagttctagcgtagtagcaattcctttggtggaagaggctatcgagagtcaactctgccttcaagtagcttccaaaagtaaacaactgtggatcgtttctaatctcaagacgcttgaaagagcaagagcttgtattgatcgaggtggtattgagatagttaagactgtccaagaattacgactaccaaagatcttcgttagcaacgaaacttgagaacgtttctaagcctgtgacttaaactctcctgcttggtgcctgcctttgaatctggactcgtagagcacgaggaagagaagtcgatttctagagcctgct

SEQ ID NO: 69 - DNA, 251 bp, Artificial Sequence
  Description of Artificial Sequence: Synthetic polynucleotide
  Exemplary stuffer sequence 3
aaggccgacccgcgaatagtagatcccgcgagggcttgaatctatcacctagagtacaccctagagaatagctagctctcaatgactaaggactaaacttggtatttcgactgaagcctgtcccctcactgttggcgctaggaggagagttcgtagaaaggatagtacgatttaagtatctctaagccttgtgaagcactaaggttgcgtacagacgtgcttgaattacggataattcgggaaccttggga

SEQ ID NO: 70 - DNA, 167 bp, Artificial Sequence
  Description of Artificial Sequence: Synthetic polynucleotide
  MH-257
aggaacccctagtgatggagttggccactccctctctgcgcgctcgctcgctcactgaggcaatttgataaaaatcgtcaaattataaacaggctttgcctgtttagcctcagtgagcgagcgagcgcgcagagagggagtggccaactccatcactaggggttcct

SEQ ID NO: 71 - DNA, 143 bp, Artificial Sequence
  Description of Artificial Sequence: Synthetic polynucleotide
  MH-258
aggaacccctagtgatggagttggccactccctctctgcgcgctcgctcgctcactgagggataaaaatccaggctttgcctgcctcagtgagcgagcgagcgcgcagagagggagtggccaactccatcactaggggttcct

SEQ ID NO: 72 - DNA, 143 bp, Artificial Sequence; identical to SEQ ID NO: 71
  Description of Artificial Sequence: Synthetic polynucleotide
  MH-Delta-258

SEQ ID NO: 73 - DNA, 208 bp, Artificial Sequence
  Description of Artificial Sequence: Synthetic polynucleotide
  MH-Telomere-1-ITR
aggaacccctagtgatggagttggccactccctctctgggattgggattgcgcgctcgctcgcgggattgggattgggattgggattgggattgggattgataaaaatcaatcccaatcccaatcccaatcccaatcccaatcccgcgagcgagcgcgcaatcccaatcccagagagggagtggccaactccatcactaggggttcct

SEQ ID NO: 74 - DNA, 199 bp, Artificial Sequence
  Description of Artificial Sequence: Synthetic polynucleotide
  MH-Telomere-2-ITR
aggaacccctagtgatggagttggccactccctctctgcgcgctcgctcgctcgggattgggattgggattgggattgggattgggattgataaaaatcaatcccaatcccaatcccaatcccaatcccaatcccgcgagcgagcgcgcaggagagggagtggccaactccatcactaggggttcctaagcttattata

SEQ ID NO: 75 - DNA, 154 bp, Artificial Sequence
  Description of Artificial Sequence: Synthetic polynucleotide
  MH-PolII-258-ITR
aggaacccctagtgatggagttggccactccctctctgcgcgctcgctcgctcactgagggcgcctataaagataaaaatccaggctttgcctgcctcagttagcgagcgagcgcgcagagagggagtggccaactccatcactaggggttcct

SEQ ID NO: 76 - DNA, 127 bp, Artificial Sequence
  Description of Artificial Sequence: Synthetic polynucleotide
  MH-258-Delta-D-conservative
ctagtgatggagttggccactccctctctgcgcgctcgctcgctcactgagggataaaaatccaggctttgcctgcctcagtgagcgagcgagcgcgcagagagggagtggccaactccatcactag

SEQ ID NO: 77 - DNA, 145 bp, Artificial Sequence
  Description of Artificial Sequence: Synthetic polynucleotide
  5' AAV2-ITR
ttggccactccctctctgcgcgctcgctcgctcactgaggccgggcgaccaaaggtcgcccgacgcccgggctttgcccgggcggcctcagtgagcgagcgagcgcgcagagagggagtggccaactccatcactaggggttcct

SEQ ID NO: 78 - DNA, 145 bp, Artificial Sequence
  Description of Artificial Sequence: Synthetic polynucleotide
  3' AAV2 ITR
aggaacccctagtgatggagttggccactccctctctgcgcgctcgctcgctcactgaggccgggcgaccaaaggtcgcccgacgcccgggctttgcccgggcggcctcagtgagcgagcgagcgcgcagagagggagtggccaa

SEQ ID NO: 79 - skipped

SEQ ID NO: 80 - DNA, 298 bp, Artificial Sequence
  Description of Artificial Sequence: Synthetic polynucleotide
  SP0010
gtttcttagcagctgctgctgtgtccaaggcttggaattgctgtggtgaatctaaaactgtctcagtagtggtgagctgacctcacccaagttcaaagccctactctgcctgatccttttttcctgagcctcagagctaaaatgcccccgagctctttcctattggctggaaagacgaattgaagttcccttgcccatgttaggaggtgtacgcctcctgaactaaagatagaaacagctggcccttccaggcagctaaaagcctccagactaagaggtgttccccattcgggccacc

SEQ ID NO: 81 - DNA, 354 bp, Artificial Sequence
  Description of Artificial Sequence: Synthetic polynucleotide
  SP0020
gggccccacagcagctgggggcatttatgggccttcctataaacttctgagagggtaactttatcctgcttctttcagccaagtatcctcctccagcagctggtcacaaagctggttaatctcccagagtgctcagcttaaaacccgtgactcacagcacagccagtgtgggggagggggtggctgcctccaatacgtggcgcccagagtcagctgttctggggccttctctggtttctccaactgagtcctgaggtttggggccttgtcttccttcctggagtccaccgcctgctgccacggccggccgtataaatagaggcgaggagcagctgggctctcttggcagtcacc

SEQ ID NO: 82 - DNA, 270 bp, Artificial Sequence
  Description of Artificial Sequence: Synthetic polynucleotide
  SP0033
gccactacgggtctaggctgcccatgtaaggaggcaaggcctggggacacccgagatgcctggttataattaacccagacatgtggctgccccccccccccaacacctgctgcctgagcctcacccccaccccggtgcctgggtcttaggctctgtacaccatggaggagaagctcgctctaaaaataaccctgccaccgcctgctgccacggccggccgtataaatagaggcgaggagcagctgggctctcttggcagtcaccgccacc

SEQ ID NO: 83 - DNA, 286 bp, Artificial Sequence
  Description of Artificial Sequence: Synthetic polynucleotide
  SP0038
taagtccgggcagggtcctgtccataaaaggcttttcccgggccggctccccgccggcagcgtgccccgccccggcccgctccatctccaaagcatgcagagaatgtctcggcagccccggtagactgctccaacttggtgtctttccccaaatatggagcctgtgtggagtcactgggggagccgggggtggggagcggagccggcttcctctagccaccgcctgctgccacggccggccgtataaatagaggcgaggagcagctgggctctcttggcagtcacc

SEQ ID NO: 84 - DNA, 315 bp, Artificial Sequence
  Description of Artificial Sequence: Synthetic polynucleotide
  SP0040
ctgagattttcctagcattttgtgtttcatgactaaatatggtttgtgtttcaagaccaatgagctgggaactgtactgttctttcccctcccatcaactcatttttggcacaagacgcactctagtcagttggagcaaatcccctgacccgggtgcagttccaaaagcagacactcgagcgtgttttacctaattaggaaatgctttgctccaaaccgaactgctcattcaggttagagaggagccaccgcctgctgccacggccggccgtataaatagaggcgaggagcagctgggctctcttggcagtcacc

SEQ ID NO: 85 - DNA, 421 bp, Artificial Sequence
  Description of Artificial Sequence: Synthetic polynucleotide
  SP0042
ctgagattttcctagcattttgtgtttcatgactaaatatggtttgtgtttcaagaccaatgagctgggaactgtactgttctttcccctcccatcaactcatttttggcacaagacgcactctagtcagttggagcaaatcccctgacccgggtgcagttccaaaagcagacactcgagcgtgttttacctaattaggaaatgctttgctccaaaccgaactgctcattcaggttagagaggagaggtccctatatggttgtgttagagtgaacggccagcttcagcccgtctttgctccttgtttgggaagcgagtgggaggggatcagagcaaggggctatataacccttcagcgttcagcctcccgggacaccacccacccagagtggagaagcccagccagtcgctgtcagccacc

SEQ ID NO: 86 - DNA, 524 bp, Artificial Sequence
  Description of Artificial Sequence: Synthetic polynucleotide
  SP0051
gggccccacagcagctgggggcatttatgggccttcctataaacttctgagagggtaactttatcctgcttctttcagccaagtatcctcctccagcagctggtcacaaagctggttaatctcccagagtgctcagcttaaaacccgtgactcacagcacagccagtgtgggggagggggtggctgcctccaatacgtggcgcccagagtcagctgttctggggccttctctggtttctccaactgagtcctgaggtttggggccttgtcttccttcctggagtttctcctctataaatacccgctctggtatttggggttggcagctgttgctgccagggagatggttgggttgacgggatcttgcagctgtcaggggaggggaggcgggggctgatgtcaggagggatacaaatagtgccgacggctgggggccctgtctcccctcgccgcatccactctccggccggccgcctgcccgccgcctcctccgtgcgcccgccagcctcgcccgcgccgtcacc

SEQ ID NO: 87 - DNA, 601 bp, Artificial Sequence
  Description of Artificial Sequence: Synthetic polynucleotide
  SP0057
ctctgtctcctcaggtgcctggctcccagtccccagaacgcctctcctgtaccttgcttcctagctgggcctttccttctcctctataaataccagctctggtatttcgccttggcagctgttgctgctagggagacggctggcttgacatgcatctcctgacaaaacacaaacccgtggtgtgagtgggtgtgggcggtgtgagtagggggatgaatcagagagggggccaccgcggtggcggccgtccgccctcggcaccatcctcacgacacccaaatatggcgacgggtgaggaatggtggggagttatttttagagcggtgaggaaggtgggcaggcagcaggtgttggcgctctaaaaataactcccgggagttatttttagagcggaggaatggtggacacccaaatatggcgacggttcctcacccgtcgccatatttgggtgtccgccctcggccggggccgcattcctgggggccgggcggtgctcccgcccgcctcgataaaaggctccggggccggcggcggcccacgagctacccggaggagcgggaggcgccaagctctagaactagtggatcccgcggccgccacc

SEQ ID NO: 88 - DNA, 531 bp, Artificial Sequence
  Description of Artificial Sequence: Synthetic polynucleotide
  SP0058
ccttgcctgactattggcaggcggacctggtggtcagacctcagtgatcctcagggaccagtgaatatttcaggctggggctgagcatcacctgctcccttggccccacttatagggcaaaggggagtctaccagcctactcactgatgacaaactggaaaagtttgtcctgtctctgctctggccccacctcgccctctcccctacttggaagttcctttcctgaaccactgactgccaaagcttgagggattaaataaatcatctggcccaaactcgggggccaggcactggcgctgacgcaggctagcagggcgccactggctggtccccacccacctcggtgggttgggggatgggcgcaccagcccctcctgggtgagccctagcctggggcttcctatttcgggagccgggggcgtgggccacgtctcctcatgtgatgcgagggctatttaaagcggcagcccgggcagggagccgccgtcggagcccttgcacgcctgctctcttgtagctgcggccgccacc

SEQ ID NO: 89 - DNA, 528 bp, Artificial Sequence
  Description of Artificial Sequence: Synthetic polynucleotide
  SP0061
ccttgcctgactattggcaggcggacctggtggtcagacctcagtgatcctcagggaccagtgaatatttcaggctggggctgagcatcacctgctcccttggccccacttatagggcaaaggggagtctaccagcctactcactgatgacaaactggaaaagtttgtcctgtctctgctctggccccacctcgccctctcccctacttggaagttcctttcctgaaccactgactgccaaagcttgagggattaaataaatcatctggcccaaataaatacccgctctggtatttggggttctcctctataaatacccgctctggtatttggggttggcagctgttgcgggatcttgcagctgtcaggggaggggaggcgggggctgatgtcaggagggatacaaatagtgccgacggctgggggccctgtctcccctcgccgcatccactctccggccggccgcctgcccgccgcctcctccgtgcgcccgccagcctcgcccgcgccgtcaccgcggccgccacc

SEQ ID NO: 90 - DNA, 454 bp, Artificial Sequence
  Description of Artificial Sequence: Synthetic polynucleotide
  SP0062
ctgtgtgtttctgtggctgagtcagatggaggagtcctcatgtttcactgcttagcagtttttgtccttcctagtacccgttcccagcccacaagatgcagaaagagctgttgctagcgtgagttatttttgtcagctgagtcaccacgccagaaagcaagaaatgacccgctttatgtctgctctgaggagctggaaccataaatacccgctctggtatttggggttctcctctataaatacccgctctggtatttggggttggcagctgttgcgggatcttgcagctgtcaggggaggggaggcgggggctgatgtcaggagggatacaaatagtgccgacggctgggggccctgtctcccctcgccgcatccactctccggccggccgcctgcccgccgcctcctccgtgcgcccgccagcctcgcccgcgccgtcaccgcggccgccacc

SEQ ID NO: 91 - DNA, 484 bp, Artificial Sequence
  Description of Artificial Sequence: Synthetic polynucleotide
  SP0064
tacatcatttacctagaaaagaggacagctgtcctttcccaaagctccggtgaccctgccccgcccagtgtgactagcccaggttggtgattctgatctgttgccaaaccaaactggctccccggggagccatttggtaatgttccctggagtcatttccttgcgaagcattccttttcggtgagaggacatttttttcatccctgataaacaaccacagcctgcgccagataaatacccgctctggtatttggggttctcctctataaatacccgctctggtatttggggttggcagctgttgcgggatcttgcagctgtcaggggaggggaggcgggggctgatgtcaggagggatacaaatagtgccgacggctgggggccctgtctcccctcgccgcatccactctccggccggccgcctgcccgccgcctcctccgtgcgcccgccagcctcgcccgcgccgtcaccgcggccgccacc

SEQ ID NO: 92 - DNA, 465 bp, Artificial Sequence
  Description of Artificial Sequence: Synthetic polynucleotide
  SP0065
taagtgtgatgcacagtgcttgcattttcttgatacgttagtcatatgagagctgacaaagaaggaaaaagagcagcgatgtggtgcaatattaacaggcagctgtcccctggcttcccgatacgtgggatgactcgcattgctgagcggtgtggtcactgccaaaggaatgaccctctcacatttcttcctgattcgcatacgccgcggcataaatacccgctctggtatttggggttctcctctataaatacccgctctggtatttggggttggcagctgttgcgggatcttgcagctgtcaggggaggggaggcgggggctgatgtcaggagggatacaaatagtgccgacggctgggggccctgtctcccctcgccgcatccactctccggccggccgcctgcccgccgcctcctccgtgcgcccgccagcctcgcccgcgccgtcaccgcggccgccacc

SEQ ID NO: 93 - DNA, 484 bp, Artificial Sequence
  Description of Artificial Sequence: Synthetic polynucleotide
  SP0066
ctctgtctcctcaggtgcctggctcccagtccccagaacgcctctcctgtaccttgcttcctagctgggcctttccttctcctctataaataccagctctggtatttcgccttggcagctgttgctgctagggagacggctggcttgacatgcatctcctgacaaaacacaaacccgtggtgtgagtgggtgtgggcggtgtgagtagggggatgaatcagagagggggcataaatacccgctctggtatttggggttctcctctataaatacccgctctggtatttggggttggcagctgttgcgggatcttgcagctgtcaggggaggggaggcgggggctgatgtcaggagggatacaaatagtgccgacggctgggggccctgtctcccctcgccgcatccactctccggccggccgcctgcccgccgcctcctccgtgcgcccgccagcctcgcccgcgccgtcaccgcggccgccacc

SEQ ID NO: 94 - DNA, 448 bp, Artificial Sequence
  Description of Artificial Sequence: Synthetic polynucleotide
  SP0068
gccactacgggtctaggctgcccatgtaaggaggcaaggcctggggacacccgagatgcctggttataattaacccagacatgtggctgccccccccccccaacacctgctgcctgagcctcacccccaccccggtgcctgggtcttaggctctgtacaccatggaggagaagctcgctctaaaaataaccctgataaatacccgctctggtatttggggttctcctctataaatacccgctctggtatttggggttggcagctgttgcgggatcttgcagctgtcaggggaggggaggcgggggctgatgtcaggagggatacaaatagtgccgacggctgggggccctgtctcccctcgccgcatccactctccggccggccgcctgcccgccgcctcctccgtgcgcccgccagcctcgcccgcgccgtcaccgcggccgccacc

SEQ ID NO: 95 - DNA, 444 bp, Artificial Sequence
  Description of Artificial Sequence: Synthetic polynucleotide
  SP0070
ctgtgtgtttctgtggctgagtcagatggaggagtcctcatgtttcactgcttagcagtttttgtccttcctagtacccgttcccagcccacaagatgcagaaagagctgttgctagcgtgagttatttttgtcagctgagtcaccacgccagaaagcaagaaatgacccgctttatgtctgctctgaggagctggaaccatttttaaagactgaggaattaggcacctgtcatttttgccagctggtgtagatgttaaaaattactgtcactcttccgcctgctactttattttgcacctgctgttacttgagttacaggcatttcacacatggtaatttaataaggttagttcccatgacacaccgcctgctgccacggccggccgtataaatagaggcgaggagcagctgggctctcttggcagtcaccgcggccgccacc

SEQ ID NO: 96 - DNA, 404 bp, Artificial Sequence
  Description of Artificial Sequence: Synthetic polynucleotide
  SP0071
gcgccctgatgaatatgcatcgcggcgcgcccgcccccggctcctcctttcggtttccttcccgccgccaggcggaagcgaagagccgcgcttcccgcgcgcccaggccggccgtggtagggtggggcggggcgggccgcgagccggagaaagagaaagcatttttaaagactgaggaattaggcacctgtcatttttgccagctggtgtagatgttaaaaattactgtcactcttccgcctgctactttattttgcacctgctgttacttgagttacaggcatttcacacatggtaatttaataaggttagttcccatgacacaccgcctgctgccacggccggccgtataaatagaggcgaggagcagctgggctctcttggcagtcaccgcggccgccacc

SEQ ID NO: 97 - DNA, 438 bp, Artificial Sequence
  Description of Artificial Sequence: Synthetic polynucleotide
  SP0076
gccactacgggtctaggctgcccatgtaaggaggcaaggcctggggacacccgagatgcctggttataattaacccagacatgtggctgccccccccccccaacacctgctgcctgagcctcacccccaccccggtgcctgggtcttaggctctgtacaccatggaggagaagctcgctctaaaaataaccctgatttttaaagactgaggaattaggcacctgtcatttttgccagctggtgtagatgttaaaaattactgtcactcttccgcctgctactttattttgcacctgctgttacttgagttacaggcatttcacacatggtaatttaataaggttagttcccatgacacaccgcctgctgccacggccggccgtataaatagaggcgaggagcagctgggctctcttggcagtcaccgcggccgccacc

SEQ ID NO: 98 - DNA, 538 bp, Artificial Sequence
  Description of Artificial Sequence: Synthetic polynucleotide
  SP0132
gggccccacagcagctgggggcatttatgggccttcctataaacttctgagagggtaactttatcctgcttctttcagccaagtatcctcctccagcagctggtcacaaagctggttaatctcccagagtgctcagcttaaaacccgtgactcacagcacagccagtgtgggggagggggtggctgcctccaatacgtggcgcccagagtcagctgttctggggccttctctggtttctccaactgagtcctgaggtttggggccttgtcttccttcctggagtataaatacccgctctggtatttggggttctcctctataaatacccgctctggtatttggggttggcagctgttgcgggatcttgcagctgtcaggggaggggaggcgggggctgatgtcaggagggatacaaatagtgccgacggctgggggccctgtctcccctcgccgcatccactctccggccggccgcctgcccgccgcctcctccgtgcgcccgccagcctcgcccgcgccgtcaccgcggccgccacc

SEQ ID NO: 99 - DNA, 528 bp, Artificial Sequence
  Description of Artificial Sequence: Synthetic polynucleotide
  SP0133
gggccccacagcagctgggggcatttatgggccttcctataaacttctgagagggtaactttatcctgcttctttcagccaagtatcctcctccagcagctggtcacaaagctggttaatctcccagagtgctcagcttaaaacccgtgactcacagcacagccagtgtgggggagggggtggctgcctccaatacgtggcgcccagagtcagctgttctggggccttctctggtttctccaactgagtcctgaggtttggggccttgtcttccttcctggagtatttttaaagactgaggaattaggcacctgtcatttttgccagctggtgtagatgttaaaaattactgtcactcttccgcctgctactttattttgcacctgctgttacttgagttacaggcatttcacacatggtaatttaataaggttagttcccatgacacaccgcctgctgccacggccggccgtataaatagaggcgaggagcagctgggctctcttggcagtcaccgcggccgccacc

SEQ ID NO: 100 - DNA, 655 bp, Artificial Sequence
  Description of Artificial Sequence: Synthetic polynucleotide
  SP0134
gggccccacagcagctgggggcatttatgggccttcctataaacttctgagagggtaactttatcctgcttctttcagccaagtatcctcctccagcagctggtcacaaagctggttaatctcccagagtgctcagcttaaaacccgtgactcacagcacagccagtgtgggggagggggtggctgcctccaatacgtggcgcccagagtcagctgttctggggccttctctggtttctccaactgagtcctgaggtttggggccttgtcttccttcctggagtcaccgcggtggcggccgtccgccctcggcaccatcctcacgacacccaaatatggcgacgggtgaggaatggtggggagttatttttagagcggtgaggaaggtgggcaggcagcaggtgttggcgctctaaaaataactcccgggagttatttttagagcggaggaatggtggacacccaaatatggcgacggttcctcacccgtcgccatatttgggtgtccgccctcggccggggccgcattcctgggggccgggcggtgctcccgcccgcctcgataaaaggctccggggccggcggcggcccacgagctacccggaggagcgggaggcgccaagctctagaactagtggatcccgcggccgccacc

SEQ ID NO: 101 - DNA, 588 bp, Artificial Sequence
  Description of Artificial Sequence: Synthetic polynucleotide
  SP0136
gggccccacagcagctgggggcatttatgggccttcctataaacttctgagagggtaactttatcctgcttctttcagccaagtatcctcctccagcagctggtcacaaagctggttaatctcccagagtgctcagcttaaaacccgtgactcacagcacagccagtgtgggggagggggtggctgcctccaatacgtggcgcccagagtcagctgttctggggccttctctggtttctccaactgagtcctgaggtttggggccttgtcttccttcctggagtgtttcttagcagctgctgctgtgtccaaggcttggaattgctgtggtgaatctaaaactgtctcagtagtggtgagctgacctcacccaagttcaaagccctactctgcctgatccttttttcctgagcctcagagctaaaatgcccccgagctctttcctattggctggaaagacgaattgaagttcccttgcccatgttaggaggtgtacgcctcctgaactaaagatagaaacagctggcccttccaggcagctaaaagcctccagactaagaggtgttccccattcgggcggccgccacc

SEQ ID NO: 102 - DNA, 660 bp, Artificial Sequence
  Description of Artificial Sequence: Synthetic polynucleotide
  SP0146
ctagactagcatgctgcccatgtaaggaggcaaggcctggggacacccgagatgcctggttataattaacccagacatgtggctgcccccccccccccaacacctgctgcctctaaaaataaccctgcatgccatgttcccggcgaagggccagctgtcccccgccagctagactcagcacttagtttaggaaccagtgagcaagtcagcccttggggcagcccatacaaggccatggggctgggcaagctgcacgcctgggtccggggtgggcacggtgcccgggcaacgagctgaaagctcatctgctctcaggggcccctccctggggacagcccctcctggctagtcacaccctgtaggctcctctatataacccaggggcacaggggctgccctcattctaccaccacctccacagcacagacagacactcaggagccagccagccaggtagggactgtactagcagctacaatccagctaccattctgcttttattttatggttgggataaggctggattattctgagtccaagctaggcccttttgctaatcatgttcatacctcttatcttcctcccacagctcctgggcaacgtgctggtctgtgtgctggcccatcactttggcaaagaattgcgatcgcctctagaacc

SEQ ID NO: 103 - DNA, 806 bp, Artificial Sequence
  Description of Artificial Sequence: Synthetic polynucleotide
  SP0147
gggccccacagcagctgggggcatttatgggccttcctataaacttctgagagggtaactttatcctgcttctttcagccaagtatcctcctccagcagctggtcacaaagctggttaatctcccagagtgctcagcttaaaacccgtgactcacagcacagccagtgtgggggagggggtggctgcctccaatacgtggcgcccagagtcagctgttctggggccttctctggtttctccaactgagtcctgaggtttggggccttgtcttccttcctggagtcatgttcccggcgaagggccagctgtcccccgccagctagactcagcacttagtttaggaaccagtgagcaagtcagcccttggggcagcccatacaaggccatggggctgggcaagctgcacgcctgggtccggggtgggcacggtgcccgggcaacgagctgaaagctcatctgctctcaggggcccctccctggggacagcccctcctggctagtcacaccctgtaggctcctctatataacccaggggcacaggggctgccctcattctaccaccacctccacagcacagacagacactcaggagccagccagccaggtagggactgtactagcagctacaatccagctaccattctgcttttattttatggttgggataaggctggattattctgagtccaagctaggcccttttgctaatcatgttcatacctcttatcttcctcccacagctcctgggcaacgtgctggtctgtgtgctggcccatcactttggcaaagaattgcgatcgccacc

SEQ ID NO: 104 - DNA, 938 bp, Artificial Sequence
  Description of Artificial Sequence: Synthetic polynucleotide
  SP0148
gggccccacagcagctgggggcatttatgggccttcctataaacttctgagagggtaactttatcctgcttctttcagccaagtatcctcctccagcagctggtcacaaagctggttaatctcccagagtgctcagcttaaaacccgtgactcacagcacagccagtgtgggggagggggtggctgcctccaatacgtggcgcccagagtcagctgttctggggccttctctggtttctccaactgagtcctgaggtttggggccttgtcttccttcctggagtcaattctcatgtttgacagcttatcatcgcagatccgtatggtgcactctcagtacaatctgctctgatgccgcatagttaagccagtatctgctccctgcttgtgtgttggaggtcgctgagtagtgcgcgagcaaaatttaagctacaacaaggcaaggcttgaccgacaattgcatgaagaatctgcttagggttaggcgttttgcgctgcttcgcgatgtacgggccagatatacgcgtatctgaggggactagggtgtgtttaggcgaaaagcggggcttcggttgtacgcggttaggagtcccctcaggatatagtagtttcgcttttgcatagggagggggaaatgtagtcttatgcaatactcttgtagtcttgcaacatggtaacgatgagttagcaacatgccttacaaggagagaaaaagcaccgtgcatgccgattggtggaagtaaggtggtacgatcgtgccttattaggaaggcaacagacgggtctgacatggattggacgaaccactgaattccgcattgcagagatattgtatttaagtgcctagctcgatacaataaacgccatttgaccattcaccacattggtgtgcacctccaagctgggtaccgcgggcccgggatccaccggtcgccacc

SEQ ID NO: 105 - DNA, 814 bp, Artificial Sequence
  Description of Artificial Sequence: Synthetic polynucleotide
  SP0150
gcgccctgatgaatatgcatcgcggcgcgcccgcccccggctcctcctttcggtttccttcccgccgccaggcggaagcgaagagccgcgcttcccgcgcgcccaggccggccgtggtagggtggggcggggcgggccgcgagccggagaaagagaaagccaattctcatgtttgacagcttatcatcgcagatccgtatggtgcactctcagtacaatctgctctgatgccgcatagttaagccagtatctgctccctgcttgtgtgttggaggtcgctgagtagtgcgcgagcaaaatttaagctacaacaaggcaaggcttgaccgacaattgcatgaagaatctgcttagggttaggcgttttgcgctgcttcgcgatgtacgggccagatatacgcgtatctgaggggactagggtgtgtttaggcgaaaagcggggcttcggttgtacgcggttaggagtcccctcaggatatagtagtttcgcttttgcatagggagggggaaatgtagtcttatgcaatactcttgtagtcttgcaacatggtaacgatgagttagcaacatgccttacaaggagagaaaaagcaccgtgcatgccgattggtggaagtaaggtggtacgatcgtgccttattaggaaggcaacagacgggtctgacatggattggacgaaccactgaattccgcattgcagagatattgtatttaagtgcctagctcgatacaataaacgccatttgaccattcaccacattggtgtgcacctccaagctgggtaccgcgggcccgggatccaccggtcgccacc

SEQ ID NO: 106 - DNA, 418 bp, Artificial Sequence
  Description of Artificial Sequence: Synthetic polynucleotide
  SP0153
gccactacgggtctaggctgcccatgtaaggaggcaaggcctggggacacccgagatgcctggttataattaacccagacatgtggctgccccccccccccaacacctgctgcctgagcctcacccccaccccggtgcctgggtcttaggctctgtacaccatggaggagaagctcgctctaaaaataaccctgcccggcagacgctccttatacggcccggcctcgctcacctgggccgcggccaggagcgccttctttgggcagcgccgggccggggccgcgccgggcccgacacccaaatatggcgacggccggggccgcattcctgggggccgggcggcgctcccgcccgcctcgataaaaggctccggggccggcggcggcccacgagctacccggaggagcgggaggccacc

SEQ ID NO: 107 - DNA, 508 bp, Artificial Sequence
  Description of Artificial Sequence: Synthetic polynucleotide
  SP0155
gccactacgggtctaggctgcccatgtaaggaggcaaggcctggggacacccgagatgcctggttataattaacccagacatgtggctgccccccccccccaacacctgctgcctgagcctcacccccaccccggtgcctgggtcttaggctctgtacaccatggaggagaagctcgctctaaaaataaccctgttctcctctataaatacccgctctggtatttggggttggcagctgttgttctcctctataaatacccgctctggtatttggggttggcagctgttgcccggcagacgctccttatacggcccggcctcgctcacctgggccgcggccaggagcgccttctttgggcagcgccgggccggggccgcgccgggcccgacacccaaatatggcgacggccggggccgcattcctgggggccgggcggcgctcccgcccgcctcgataaaaggctccggggccggcggcggcccacgagctacccggaggagcgggag

SEQ ID NO: 108 - DNA, 718 bp, Artificial Sequence
  Description of Artificial Sequence: Synthetic polynucleotide
  SP0156
gccactacgggtctaggctgcccatgtaaggaggcaaggcctggggacacccgagatgcctggttataattaacccagacatgtggctgccccccccccccaacacctgctgcctgagcctcacccccaccccggtgcctgggtcttaggctctgtacaccatggaggagaagctcgctctaaaaataaccctggggccccacagcagctgggggcatttatgggccttcctataaacttctgagagggtaactttatcctgcttctttcagccaagtatcctcctccagcagctggtcacaaagctggttaatctcccagagtgctcagcttaaaacccgtgactcacagcacagccagtgtgggggagggggtggctgcctccaatacgtggcgcccagagtcagctgttctggggccttctctggtttctccaactgagtcctgaggtttggggccttgtcttccttcctggagtttctcctctataaatacccgctctggtatttggggttggcagctgttgctgccagggagatggttgggttgacgggatcttgcagctgtcaggggaggggaggcgggggctgatgtcaggagggatacaaatagtgccgacggctgggggccctgtctcccctcgccgcatccactctccggccggccgcctgcccgccgcctcctccgtgcgcccgccagcctcgcccgcgccgtcacc

SEQ ID NO: 109 - DNA, 202 bp, Artificial Sequence
  Description of Artificial Sequence: Synthetic polynucleotide
  SP0157
ctagactagcatgctgcccatgtaaggaggcaaggcctggggacacccgagatgcctggttataattaacccagacatgtggctgcccccccccccccaacacctgctgcctctaaaaataaccctgcatgcccaccgcctgctgccacggccggccgtataaatagaggcgaggagcagctgggctctcttggcagtcacc

SEQ ID NO: 110 - DNA, 705 bp, Artificial Sequence
  Description of Artificial Sequence: Synthetic polynucleotide
  SP0158
gggccccacagcagctgggggcatttatgggccttcctataaacttctgagagggtaactttatcctgcttctttcagccaagtatcctcctccagcagctggtcacaaagctggttaatctcccagagtgctcagcttaaaacccgtgactcacagcacagccagtgtgggggagggggtggctgcctccaatacgtggcgcccagagtcagctgttctggggccttctctggtttctccaactgagtcctgaggtttggggccttgtcttccttcctggagtctgagattttcctagcattttgtgtttcatgactaaatatggtttgtgtttcaagaccaatgagctgggaactgtactgttctttcccctcccatcaactcatttttggcacaagacgcactctagtcagttggagcaaatcccctgacccgggtgcagttccaaaagcagacactcgagcgtgttttacctaattaggaaatgctttgctccaaaccgaactgctcattcaggttagagaggagaggtccctatatggttgtgttagagtgaacggccagcttcagcccgtctttgctccttgtttgggaagcgagtgggaggggatcagagcaaggggctatataacccttcagcgttcagcctcccgggacaccacccacccagagtggagaagcccagccagtcgctgtcagccacc

SEQ ID NO: 111 - DNA, 615 bp, Artificial Sequence
  Description of Artificial Sequence: Synthetic polynucleotide
  SP0159
gccactacgggtctaggctgcccatgtaaggaggcaaggcctggggacacccgagatgcctggttataattaacccagacatgtggctgccccccccccccaacacctgctgcctgagcctcacccccaccccggtgcctgggtcttaggctctgtacaccatggaggagaagctcgctctaaaaataaccctgctgagattttcctagcattttgtgtttcatgactaaatatggtttgtgtttcaagaccaatgagctgggaactgtactgttctttcccctcccatcaactcatttttggcacaagacgcactctagtcagttggagcaaatcccctgacccgggtgcagttccaaaagcagacactcgagcgtgttttacctaattaggaaatgctttgctccaaaccgaactgctcattcaggttagagaggagaggtccctatatggttgtgttagagtgaacggccagcttcagcccgtctttgctccttgtttgggaagcgagtgggaggggatcagagcaaggggctatataacccttcagcgttcagcctcccgggacaccacccacccagagtggagaagcccagccagtcgctgtcagccacc

SEQ ID NO: 112 - DNA, 586 bp, Artificial Sequence
  Description of Artificial Sequence: Synthetic polynucleotide
  SP0160
gccactacgggtctaggctgcccatgtaaggaggcaaggcctggggacacccgagatgcctggttataattaacccagacatgtggctgccccccccccccaacacctgctgcctgagcctcacccccaccccggtgcctgggtcttaggctctgtacaccatggaggagaagctcgctctaaaaataaccctgtaagtccgggcagggtcctgtccataaaaggcttttcccgggccggctccccgccggcagcgtgccccgccccggcccgctccatctccaaagcatgcagagaatgtctcggcagccccggtagactgctccaacttggtgtctttccccaaatatggagcctgtgtggagtcactgggggagccgggggtggggagcggagccggcttcctctagaggtccctatatggttgtgttagagtgaacggccagcttcagcccgtctttgctccttgtttgggaagcgagtgggaggggatcagagcaaggggctatataacccttcagcgttcagcctcccgggacaccacccacccagagtggagaagcccagccagtcgctgtcagccacc

SEQ ID NO: 113 - DNA, 740 bp, Artificial Sequence
  Description of Artificial Sequence: Synthetic polynucleotide
  SP0161
gggccccacagcagctgggggcatttatgggccttcctataaacttctgagagggtaactttatcctgcttctttcagccaagtatcctcctccagcagctggtcacaaagctggttaatctcccagagtgctcagcttaaaacccgtgactcacagcacagccagtgtgggggagggggtggctgcctccaatacgtggcgcccagagtcagctgttctggggccttctctggtttctccaactgagtcctgaggtttggggccttgtcttccttcctggagtctgagattttcctagcattttgtgtttcatgactaaatatggtttgtgtttcaagaccaatgagctgggaactgtactgttctttcccctcccatcaactcatttttggcacaagacgcactctagtcagttggagcaaatcccctgacccgggtgcagttccaaaagcagacactcgagcgtgttttacctaattaggaaatgctttgctccaaaccgaactgctcattcaggttagagaggagctgagtccttttgcatacatttttcaaatgataactcactctacccaccccccttccctacccccaaggcgatttattgaaaaaaccaccttatatggtaatattgctaacacaccgtcagctggcctttttagggactttgtttaaagaagatccgcctctggggttttatattgctctggtattcatgccaaagacacaccaggccacc

SEQ ID NO: 114 - DNA, 650 bp, Artificial Sequence
  Description of Artificial Sequence: Synthetic polynucleotide
  SP0162
gccactacgggtctaggctgcccatgtaaggaggcaaggcctggggacacccgagatgcctggttataattaacccagacatgtggctgccccccccccccaacacctgctgcctgagcctcacccccaccccggtgcctgggtcttaggctctgtacaccatggaggagaagctcgctctaaaaataaccctgctgagattttcctagcattttgtgtttcatgactaaatatggtttgtgtttcaagaccaatgagctgggaactgtactgttctttcccctcccatcaactcatttttggcacaagacgcactctagtcagttggagcaaatcccctgacccgggtgcagttccaaaagcagacactcgagcgtgttttacctaattaggaaatgctttgctccaaaccgaactgctcattcaggttagagaggagctgagtccttttgcatacatttttcaaatgataactcactctacccaccccccttccctacccccaaggcgatttattgaaaaaaccaccttatatggtaatattgctaacacaccgtcagctggcctttttagggactttgtttaaagaagatccgcctctggggttttatattgctctggtattcatgccaaagacacaccaggccacc

SEQ ID NO: 115 - DNA, 621 bp, Artificial Sequence
  Description of Artificial Sequence: Synthetic polynucleotide
  SP0163
gccactacgggtctaggctgcccatgtaaggaggcaaggcctggggacacccgagatgcctggttataattaacccagacatgtggctgccccccccccccaacacctgctgcctgagcctcacccccaccccggtgcctgggtcttaggctctgtacaccatggaggagaagctcgctctaaaaataaccctgtaagtccgggcagggtcctgtccataaaaggcttttcccgggccggctccccgccggcagcgtgccccgccccggcccgctccatctccaaagcatgcagagaatgtctcggcagccccggtagactgctccaacttggtgtctttccccaaatatggagcctgtgtggagtcactgggggagccgggggtggggagcggagccggcttcctctagctgagtccttttgcatacatttttcaaatgataactcactctacccaccccccttccctacccccaaggcgatttattgaaaaaaccaccttatatggtaatattgctaacacaccgtcagctggcctttttagggactttgtttaaagaagatccgcctctggggttttatattgctctggtattcatgccaaagacacaccaggccacc

SEQ ID NO: 116 - DNA, 764 bp, Artificial Sequence
  Description of Artificial Sequence: Synthetic polynucleotide
  SP0164
cccacccatgcctcctcaggtaccccctgccccccacagctcctctcctgtgccttgtttcccagccatgcgttctcctctataaatacccgctctggtatttggggttggcagctgttgctgccagggagatggttgggttgacatgcggctcctgacaaaacacaaacccctggtgtgtgtgggcgtgggtggtgtgagtagggggatgaatcagggagggggcggggggggccccacagcagctgggggcatttatgggccttcctataaacttctgagagggtaactttatcctgcttctttcagccaagtatcctcctccagcagctggtcacaaagctggttaatctcccagagtgctcagcttaaaacccgtgactcacagcacagccagtgtgggggagggggtggctgcctccaatacgtggcgcccagagtcagctgttctggggccttctctggtttctccaactgagtcctgaggtttggggccttgtcttccttcctggagtgactcaggggcgcaggcctcttgcgggggagctggcctccccgcccccacggccacgggccgccctttcctggcaggacagcgggatcttgcagctgtcaggggaggggaggcgggggctgatgtcaggagggatacaaatagtgccgacggctgggggccctgtctcccctcgccgcatccactctccggccggccgcctgcccgccgcctcctccgtgcgcccgccagcctcgcccgcgccgtcacc

SEQ ID NO: 117 - DNA, 480 bp, Artificial Sequence
  Description of Artificial Sequence: Synthetic polynucleotide
  SP0165
cccacccatgcctcctcaggtaccccctgccccccacagctcctctcctgtgccttgtttcccagccatgcgttctcctctataaatacccgctctggtatttggggttggcagctgttgctgccagggagatggttgggttgacatgcggctcctgacaaaacacaaacccctggtgtgtgtgggcgtgggtggtgtgagtagggggatgaatcagggagggggcggggggactcaggggcgcaggcctcttgcgggggagctggcctccccgcccccacggccacgggccgccctttcctggcaggacagcgggatcttgcagctgtcaggggaggggaggcgggggctgatgtcaggagggatacaaatagtgccgacggctgggggccctgtctcccctcgccgcatccactctccggccggccgcctgcccgccgcctcctccgtgcgcccgccagcctcgcccgcgccgtcacc

SEQ ID NO: 118 - DNA, 894 bp, Artificial Sequence
  Description of Artificial Sequence: Synthetic polynucleotide
  SP0166
caccgcggtggcggccgtccgccctcggcaccatcctcacgacacccaaatatggcgacgggtgaggaatggtggggagttatttttagagcggtgaggaaggtgggcaggcagcaggtgttggcgctctaaaaataactcccgggagttatttttagagcggaggaatggtggacacccaaatatggcgacggttcctcacccgtcgccatatttgggtgtccgccctcggccggggcccaattctcatgtttgacagcttatcatcgcagatccgtatggtgcactctcagtacaatctgctctgatgccgcatagttaagccagtatctgctccctgcttgtgtgttggaggtcgctgagtagtgcgcgagcaaaatttaagctacaacaaggcaaggcttgaccgacaattgcatgaagaatctgcttagggttaggcgttttgcgctgcttcgcgatgtacgggccagatatacgcgtatctgaggggactagggtgtgtttaggcgaaaagcggggcttcggttgtacgcggttaggagtcccctcaggatatagtagtttcgcttttgcatagggagggggaaatgtagtcttatgcaatactcttgtagtcttgcaacatggtaacgatgagttagcaacatgccttacaaggagagaaaaagcaccgtgcatgccgattggtggaagtaaggtggtacgatcgtgccttattaggaaggcaacagacgggtctgacatggattggacgaaccactgaattccgcattgcagagatattgtatttaagtgcctagctcgatacaataaacgccatttgaccattcaccacattggtgtgcacctccaagctgggtaccgcgggcccgggatccaccggtcgccacc

SEQ ID NO: 119 - DNA, 248 bp, Artificial Sequence
  Description of Artificial Sequence: Synthetic polynucleotide
  SP0169
ataaatacccgctctggtatttggggttctcctctataaatacccgctctggtatttggggttggcagctgttgcgggatcttgcagctgtcaggggaggggaggcgggggctgatgtcaggagggatacaaatagtgccgacggctgggggccctgtctcccctcgccgcatccactctccggccggccgcctgcccgccgcctcctccgtgcgcccgccagcctcgcccgcgccgtcaccgccacc

SEQ ID NO: 120 - DNA, 482 bp, Artificial Sequence
  Description of Artificial Sequence: Synthetic polynucleotide
  SP0170
caccgcggtggcggccgtccgccctcggcaccatcctcacgacacccaaatatggcgacgggtgaggaatggtggggagttatttttagagcggtgaggaaggtgggcaggcagcaggtgttggcgctctaaaaataactcccgggagttatttttagagcggaggaatggtggacacccaaatatggcgacggttcctcacccgtcgccatatttgggtgtccgccctcggccggggccataaatacccgctctggtatttggggttctcctctataaatacccgctctggtatttggggttggcagctgttgcgggatcttgcagctgtcaggggaggggaggcgggggctgatgtcaggagggatacaaatagtgccgacggctgggggccctgtctcccctcgccgcatccactctccggccggccgcctgcccgccgcctcctccgtgcgcccgccagcctcgcccgcgccgtcacc

SEQ ID NO: 121 - DNA, 534 bp, Artificial Sequence
  Description of Artificial Sequence: Synthetic polynucleotide
  SP0171
gtttcttagcagctgctgctgtgtccaaggcttggaattgctgtggtgaatctaaaactgtctcagtagtggtgagctgacctcacccaagttcaaagccctactctgcctgatccttttttcctgagcctcagagctaaaatgcccccgagctctttcctattggctggaaagacgaattgaagttcccttgcccatgttaggaggtgtacgcctcctgaactaaagatagaaacagctggcccttccaggcagctaaaagcctccagactaagaggtgttccccattcggataaatacccgctctggtatttggggttctcctctataaatacccgctctggtatttggggttggcagctgttgcgggatcttgcagctgtcaggggaggggaggcgggggctgatgtcaggagggatacaaatagtgccgacggctgggggccctgtctcccctcgccgcatccactctccggccggccgcctgcccgccgcctcctccgtgcgcccgccagcctcgcccgcgccgtcacc

SEQ ID NO: 122 - DNA, 728 bp, Artificial Sequence
  Description of Artificial Sequence: Synthetic polynucleotide
  SP0173
gtttcttagcagctgctgctgtgtccaaggcttggaattgctgtggtgaatctaaaactgtctcagtagtggtgagctgacctcacccaagttcaaagccctactctgcctgatccttttttcctgagcctcagagctaaaatgcccccgagctctttcctattggctggaaagacgaattgaagttcccttgcccatgttaggaggtgtacgcctcctgaactaaagatagaaacagctggcccttccaggcagctaaaagcctccagactaagaggtgttccccattcgggccactacgggtctaggctgcccatgtaaggaggcaaggcctggggacacccgagatgcctggttataattaacccagacatgtggctgccccccccccccaacacctgctgcctgagcctcacccccaccccggtgcctgggtcttaggctctgtacaccatggaggagaagctcgctctaaaaataaccctgataaatacccgctctggtatttggggttctcctctataaatacccgctctggtatttggggttggcagctgttgcgggatcttgcagctgtcaggggaggggaggcgggggctgatgtcaggagggatacaaatagtgccgacggctgggggccctgtctcccctcgccgcatccactctccggccggccgcctgcccgccgcctcctccgtgcgcccgccagcctcgcccgcgccgtcacc

SEQ ID NO: 123 - DNA, 885 bp, Artificial Sequence
  Description of Artificial Sequence: Synthetic polynucleotide
  SP0228
gggccccacagcagctgggggcatttatgggccttcctataaacttctgagagggtaactttatcctgcttctttcagccaagtatcctcctccagcagctggtcacaaagctggttaatctcccagagtgctcagcttaaaacccgtgactcacagcacagccagtgtgggggagggggtggctgcctccaatacgtggcgcccagagtcagctgttctggggccttctctggtttctccaactgagtcctgaggtttggggccttgtcttccttcctggagtctctgtctcctcaggtgcctggctcccagtccccagaacgcctctcctgtaccttgcttcctagctgggcctttccttctcctctataaataccagctctggtatttcgccttggcagctgttgctgctagggagacggctggcttgacatgcatctcctgacaaaacacaaacccgtggtgtgagtgggtgtgggcggtgtgagtagggggatgaatcagagagggggccaccgcggtggcggccgtccgccctcggcaccatcctcacgacacccaaatatggcgacgggtgaggaatggtggggagttatttttagagcggtgaggaaggtgggcaggcagcaggtgttggcgctctaaaaataactcccgggagttatttttagagcggaggaatggtggacacccaaatatggcgacggttcctcacccgtcgccatatttgggtgtccgccctcggccggggccgcattcctgggggccgggcggtgctcccgcccgcctcgataaaaggctccggggccggcggcggcccacgagctacccggaggagcgggaggcgccaagctctagaactagtggatcccgcggccgccacc

SEQ ID NO: 124 - DNA, 1003 bp, Artificial Sequence
  Description of Artificial Sequence: Synthetic polynucleotide
  SP0229
gggccccacagcagctgggggcatttatgggccttcctataaacttctgagagggtaactttatcctgcttctttcagccaagtatcctcctccagcagctggtcacaaagctggttaatctcccagagtgctcagcttaaaacccgtgactcacagcacagccagtgtgggggagggggtggctgcctccaatacgtggcgcccagagtcagctgttctggggccttctctggtttctccaactgagtcctgaggtttggggccttgtcttccttcctggagtctctgtctcctcaggtgcctggctcccagtccccagaacgcctctcctgtaccttgcttcctagctgggcctttccttctcctctataaataccagctctggtatttcgccttggcagctgttgctgctagggagacggctggcttgacatgcatctcctgacaaaacacaaacccgtggtgtgagtgggtgtgggcggtgtgagtagggggatgaatcagagagggggccaccgcggtggcggccgtccgccctcggcaccatcctcacgacacccaaatatggcgacgggtgaggaatggtggggagttatttttagagcggtgaggaaggtgggcaggcagcaggtgttggcgctctaaaaataactcccgggagttatttttagagcggaggaatggtggacacccaaatatggcgacggttcctcacccgtcgccatatttgggtgtccgccctcggccgataaatacccgctctggtatttggggttctcctctataaatacccgctctggtatttggggttggcagctgttgcgggatcttgcagctgtcaggggaggggaggcgggggctgatgtcaggagggatacaaatagtgccgacggctgggggccctgtctcccctcgccgcatccactctccggccggccgcctgcccgccgcctcctccgtgcgcccgccagcctcgcccgcgccgtcaccgcggccgccacc

SEQ ID NO: 125 - DNA, 953 bp, Artificial Sequence
  Description of Artificial Sequence: Synthetic polynucleotide
  SP0230
gggccccacagcagctgggggcatttatgggccttcctataaacttctgagagggtaactttatcctgcttctttcagccaagtatcctcctccagcagctggtcacaaagctggttaatctcccagagtgctcagcttaaaacccgtgactcacagcacagccagtgtgggggagggggtggctgcctccaatacgtggcgcccagagtcagctgttctggggccttctctggtttctccaactgagtcctgaggtttggggccttgtcttccttcctggagtatcaagcttggtacgggccccacagcagctgggggcatttatgggccttcctataaacttctgagagggtaactttatcctgcttctttcagccaagtatcctcctccagcagctggtcacaaagctggttaatctcccagagtgctcagcttaaaacccgtgactcacagcacagccagtgtgggggagggggtggctgcctccaatacgtggcgcccagagtcagctgttctggggccttctctggtttctccaactgagtcctgaggtttggggccttgtcttccttcctggagtcaccgcggtggcggccgtccgccctcggcaccatcctcacgacacccaaatatggcgacgggtgaggaatggtggggagttatttttagagcggtgaggaaggtgggcaggcagcaggtgttggcgctctaaaaataactcccgggagttatttttagagcggaggaatggtggacacccaaatatggcgacggttcctcacccgtcgccatatttgggtgtccgccctcggccggggccgcattcctgggggccgggcggtgctcccgcccgcctcgataaaaggctccggggccggcggcggcccacgagctacccggaggagcgggaggcgccaagctctagaactagtggatcccgcggccgccacc

SEQ ID NO: 126 - DNA, 773 bp, Artificial Sequence
  Description of Artificial Sequence: Synthetic polynucleotide
  SP0231
gggccccacagcagctgggggcatttatgggccttcctataaacttctgagagggtaactttatcctgcttctttcagccaagtatcctcctccagcagctggtcacaaagctggttaatctcccagagtgctcagcttaaaacccgtgactcacagcacagccagtgtgggggagggggtggctgcctccaatacgtggcgcccagagtcagctgttctggggccttctctggtttctccaactgagtcctgaggtttggggccttgtcttccttcctggagtcaccgcggtggcggccgtccgccctcggcaccatcctcacgacacccaaatatggcgacgggtgaggaatggtggggagttatttttagagcggtgaggaaggtgggcaggcagcaggtgttggcgctctaaaaataactcccgggagttatttttagagcggaggaatggtggacacccaaatatggcgacggttcctcacccgtcgccatatttgggtgtccgccctcggccgataaatacccgctctggtatttggggttctcctctataaatacccgctctggtatttggggttggcagctgttgcgggatcttgcagctgtcaggggaggggaggcgggggctgatgtcaggagggatacaaatagtgccgacggctgggggccctgtctcccctcgccgcatccactctccggccggccgcctgcccgccgcctcctccgtgcgcccgccagcctcgcccgcgccgtcaccgcggccgccacc

SEQ ID NO: 127 - DNA, 683 bp, Artificial Sequence
  Description of Artificial Sequence: Synthetic polynucleotide
  SP0232
gccactacgggtctaggctgcccatgtaaggaggcaaggcctggggacacccgagatgcctggttataattaacccagacatgtggctgccccccccccccaacacctgctgcctgagcctcacccccaccccggtgcctgggtcttaggctctgtacaccatggaggagaagctcgctctaaaaataaccctgcaccgcggtggcggccgtccgccctcggcaccatcctcacgacacccaaatatggcgacgggtgaggaatggtggggagttatttttagagcggtgaggaaggtgggcaggcagcaggtgttggcgctctaaaaataactcccgggagttatttttagagcggaggaatggtggacacccaaatatggcgacggttcctcacccgtcgccatatttgggtgtccgccctcggccgataaatacccgctctggtatttggggttctcctctataaatacccgctctggtatttggggttggcagctgttgcgggatcttgcagctgtcaggggaggggaggcgggggctgatgtcaggagggatacaaatagtgccgacggctgggggccctgtctcccctcgccgcatccactctccggccggccgcctgcccgccgcctcctccgtgcgcccgccagcctcgcccgcgccgtcaccgcggccgccacc

SEQ ID NO: 128 - DNA, 710 bp, Artificial Sequence
  Description of Artificial Sequence: Synthetic polynucleotide
  SP0257
gtttcttagcagctgctgctgtgtccaaggcttggaattgctgtggtgaatctaaaactgtctcagtagtggtgagctgacctcacccaagttcaaagccctactctgcctgatccttttttcctgagcctcagagctaaaatgcccccgagctctttcctattggctggaaagacgaattgaagttcccttgcccatgttaggaggtgtacgcctcctgaactaaagatagaaacagctggcccttccaggcagctaaaagcctccagactaagaggtgttccccattcgggccactacgggtctaggctgcccatgtaaggaggcaaggcctggggacacccgagatgcctggttataattaacccagacatgtggctgccccccccccccaacacctgctgcctgagcctcacccccaccccggtgcctgggtcttaggctctgtacaccatggaggagaagctcgctctaaaaataaccctgcccggcagacgctccttatacggcccggcctcgctcacctgggccgcggccaggagcgccttctttgggcagcgccgggccggggccgcgccgggcccgacacccaaatatggcgacggccggggccgcattcctgggggccgggcggcgctcccgcccgcctcgataaaaggctccggggccggcggcggcccacgagctacccggaggagcgggaggccacc

SEQ ID NO: 129 - DNA, 943 bp, Artificial Sequence
  Description of Artificial Sequence: Synthetic polynucleotide
  SP0262
gtttcttagcagctgctgctgtgtccaaggcttggaattgctgtggtgaatctaaaactgtctcagtagtggtgagctgacctcacccaagttcaaagccctactctgcctgatccttttttcctgagcctcagagctaaaatgcccccgagctctttcctattggctggaaagacgaattgaagttcccttgcccatgttaggaggtgtacgcctcctgaactaaagatagaaacagctggcccttccaggcagctaaaagcctccagactaagaggtgttccccattcgggccactacgggtctaggctgcccatgtaaggaggcaaggcctggggacacccgagatgcctggttataattaacccagacatgtggctgccccccccccccaacacctgctgcctgagcctcacccccaccccggtgcctgggtcttaggctctgtacaccatggaggagaagctcgctctaaaaataaccctgccagctgcctgccccctgcctggcacagcccgtacctggccgcacgctccctcacaggtgaagctcgaaaactccgtccccgtaaggagccccgctgccccccgaggcctcctccctcacgcctcgctgcgctcccggctcccgcacggccctgggagaggcccccaccgcttcgtccttaacgggcccggcggtgccgggggattatttcggccccggccccgggggggcccggcagacgctccttatacggcccggcctcgctcacctgggccgcggccaggagcgccttctttgggcagcgccgggccggggccgcgccgggcccgacacccaaatatggcgacggccggggccgcattcctgggggccgggcggcgctcccgcccgcctcgataaaaggctccggggccggcggcggcccacgagctacccggaggagcgggaggcggccacc

SEQ ID NO: 130 - DNA, 724 bp, Artificial Sequence
  Description of Artificial Sequence: Synthetic polynucleotide
  SP0264
gccactacgggtctaggctgcccatgtaaggaggcaaggcctggggacacccgagatgcctggttataattaacccagacatgtggctgccccccccccccaacacctgctgcctgagcctcacccccaccccggtgcctgggtcttaggctctgtacaccatggaggagaagctcgctctaaaaataaccctggccgcgaagaccggaagctggggcggccccgggccgcgcgcgctgggcctgggaggcgaaactcagcttccttcgtttccgacttttccatccgcgtcctccacttccccgttccgccctcccccattgccaacattctggctgagtcacggcgccccagagcgcgccaggctgggggaaaggagcagaagggagggccctagcgacccgcgggatgtggtccgagtcacgtccgaggggggtggggagggatcgtgttctcggcgcccgccccttcctagcgcggcctctgggctgcgcctctcgggggcggcccgtagcccagtccgtcgcctgccattggacgccgcccgctcctcgtaaaggaaaaagctcggcggagggcggagtggtgcctttaaaaggccgggcgccgccttccgcctgcccgcctcctgcgccgccccttccgaggctaaatcggctgcgttcctctcggaacgcgccgcagaaggggtcctggtgacgagtcccgcgttctctccgccacc

SEQ ID NO: 131 - DNA, 822 bp, Artificial Sequence
  Description of Artificial Sequence: Synthetic polynucleotide
  SP0265
gtttcttagcagctgctgctgtgtccaaggcttggaattgctgtggtgaatctaaaactgtctcagtagtggtgagctgacctcacccaagttcaaagccctactctgcctgatccttttttcctgagcctcagagctaaaatgcccccgagctctttcctattggctggaaagacgaattgaagttcccttgcccatgttaggaggtgtacgcctcctgaactaaagatagaaacagctggcccttccaggcagctaaaagcctccagactaagaggtgttccccattcgggccgcgaagaccggaagctggggcggccccgggccgcgcgcgctgggcctgggaggcgaaactcagcttccttcgtttccgacttttccatccgcgtcctccacttccccgttccgccctcccccattgccaacattctggctgagtcacggcgccccagagcgcgccaggctgggggaaaggagcagaagggagggccctagcgacccgcgggatgtggtccgagtcacgtccgaggggggtggggagggatcgtgttctcggcgcccgccccttcctagcgcggcctctgggctgcgcctctcgggggcggcccgtagcccagtccgtcgcctgccattggacgccgcccgctcctcgtaaaggaaaaagctcggcggagggcggagtggtgcctttaaaaggccgggcgccgccttccgcctgcccgcctcctgcgccgccccttccgaggctaaatcggctgcgttcctctcggaacgcgccgcagaaggggtcctggtgacgagtcccgcgttctctccgccacc

SEQ ID NO: 132 - DNA, 1016 bp, Artificial Sequence
  Description of Artificial Sequence: Synthetic polynucleotide
  SP0266
gtttcttagcagctgctgctgtgtccaaggcttggaattgctgtggtgaatctaaaactgtctcagtagtggtgagctgacctcacccaagttcaaagccctactctgcctgatccttttttcctgagcctcagagctaaaatgcccccgagctctttcctattggctggaaagacgaattgaagttcccttgcccatgttaggaggtgtacgcctcctgaactaaagatagaaacagctggcccttccaggcagctaaaagcctccagactaagaggtgttccccattcgggccactacgggtctaggctgcccatgtaaggaggcaaggcctggggacacccgagatgcctggttataattaacccagacatgtggctgccccccccccccaacacctgctgcctgagcctcacccccaccccggtgcctgggtcttaggctctgtacaccatggaggagaagctcgctctaaaaataaccctggccgcgaagaccggaagctggggcggccccgggccgcgcgcgctgggcctgggaggcgaaactcagcttccttcgtttccgacttttccatccgcgtcctccacttccccgttccgccctcccccattgccaacattctggctgagtcacggcgccccagagcgcgccaggctgggggaaaggagcagaagggagggccctagcgacccgcgggatgtggtccgagtcacgtccgaggggggtggggagggatcgtgttctcggcgcccgccccttcctagcgcggcctctgggctgcgcctctcgggggcggcccgtagcccagtccgtcgcctgccattggacgccgcccgctcctcgtaaaggaaaaagctcggcggagggcggagtggtgcctttaaaaggccgggcgccgccttccgcctgcccgcctcctgcgccgccccttccgaggctaaatcggctgcgttcctctcggaacgcgccgcagaaggggtcctggtgacgagtcccgcgttctctccgccacc

SEQ ID NO: 133 - DNA, 560 bp, Artificial Sequence
  Description of Artificial Sequence: Synthetic polynucleotide
  SP0267
cccttcagattaaaaataactgaggtaagggcctgggtaggggaggtggtgtgagacgctcctgtctctcctctatctgcccatcggccctttggggaggaggaatgtgcccaaggactaaaaaaaggccatggagccagaggggcgagggcaacagacctttcatgggcaaaccttggggccctgctgcaccgcggtggcggccgtccgccctcggcaccatcctcacgacacccaaatatggcgacgggtgaggaatggtggggagttatttttagagcggtgaggaaggtgggcaggcagcaggtgttggcgctctaaaaataactcccgggagttatttttagagcggaggaatggtggacacccaaatatggcgacggttcctcacccgtcgccatatttgggtgtccgccctcggccggggccgcattcctgggggccgggcggtgctcccgcccgcctcgataaaaggctccggggccggcggcggcccacgagctacccggaggagcgggaggcgccaagctctagaactagtggatcccgcggccgccacc

SEQ ID NO: 134 - DNA, 728 bp, Artificial Sequence
  Description of Artificial Sequence: Synthetic polynucleotide
  SP0268
gccactacgggtctaggctgcccatgtaaggaggcaaggcctggggacacccgagatgcctggttataattaacccagacatgtggctgccccccccccccaacacctgctgcctgagcctcacccccaccccggtgcctgggtcttaggctctgtacaccatggaggagaagctcgctctaaaaataaccctggtttcttagcagctgctgctgtgtccaaggcttggaattgctgtggtgaatctaaaactgtctcagtagtggtgagctgacctcacccaagttcaaagccctactctgcctgatccttttttcctgagcctcagagctaaaatgcccccgagctctttcctattggctggaaagacgaattgaagttcccttgcccatgttaggaggtgtacgcctcctgaactaaagatagaaacagctggcccttccaggcagctaaaagcctccagactaagaggtgttccccattcggataaatacccgctctggtatttggggttctcctctataaatacccgctctggtatttggggttggcagctgttgcgggatcttgcagctgtcaggggaggggaggcgggggctgatgtcaggagggatacaaatagtgccgacggctgggggccctgtctcccctcgccgcatccactctccggccggccgcctgcccgccgcctcctccgtgcgcccgccagcctcgcccgcgccgtcacc

SEQ ID NO: 135 - DNA, 562 bp, Artificial Sequence
  Description of Artificial Sequence: Synthetic polynucleotide
  SP0270
gccactacgggtctaggctgcccatgtaaggaggcaaggcctggggacacccgagatgcctggttataattaacccagacatgtggctgccccccccccccaacacctgctgcctgagcctcacccccaccccggtgcctgggtcttaggctctgtacaccatggaggagaagctcgctctaaaaataaccctgtcaaagccctactctgcctgatccttttttcctgagcctcagagctaaaatgcccccgagctctttcctattggctggaaagacgaattgaagttcccttgcccatgttaggaggtgtacgcctcctgaactaaagatagaaacagctggcccttccaggcagctaaaagcctccagactaagaggtgttccccattcggcgggatcttgcagctgtcaggggaggggaggcgggggctgatgtcaggagggatacaaatagtgccgacggctgggggccctgtctcccctcgccgcatccactctccggccggccgcctgcccgccgcctcctccgtgcgcccgccagcctcgcccgcgccgtcacc

SEQ ID NO: 136 - DNA, 451 bp, Artificial Sequence
  Description of Artificial Sequence: Synthetic polynucleotide
  SP0271
gccactacgggtctaggctgcccatgtaaggaggcaaggcctggggacacccgagatgcctggttataattaacccagacatgtggctgccccccccccccaacacctgctgcctgagcctcacccccaccccggtgcctgggtcttaggctctgtacaccatggaggagaagctcgctctaaaaataaccctgtcaaagccctactctgcctgatccttttttcctgagcctcagagctaaaatgcccccgagctctttcctattggctggaaagacgaattgaagttcccttgcccatgttaggaggtgtacgcctcctgaactaaagatagaaacagctggcccttccaggcagctaaaagcctccagactaagaggtgttccccattcggcagccagactccttgaaataccctttcagtaatcattcaaccaacgcttccgccacc

SEQ ID NO: 137 - DNA, 883 bp, Artificial Sequence
  Description of Artificial Sequence: Synthetic polynucleotide
  SP0279
gggccccacagcagctgggggcatttatgggccttcctataaacttctgagagggtaactttatcctgcttctttcagccaagtatcctcctccagcagctggtcacaaagctggttaatctcccagagtgctcagcttaaaacccgtgactcacagcacagccagtgtgggggagggggtggctgcctccaatacgtggcgcccagagtcagctgttctggggccttctctggtttctccaactgagtcctgaggtttggggccttgtcttccttcctggagtcaccgcggtggcggccgtccgccctcggcaccatcctcacgacacccaaatatggcgacgggtgaggaatggtggggagttatttttagagcggtgaggaaggtgggcaggcagcaggtgttggcgctctaaaaataactcccgggagttatttttagagcggaggaatggtggacacccaaatatggcgacggttcctcacccgtcgccatatttgggtgtccgccctcggccggggccgcattcctgggggccgggcggtgctcccgcccgcctcgataaaaggctccggggccggcggcggcccactcagatcgcctggagacgccatccacgctgttttgacctccatagaagacaccgggaccgatccagcctccgcggccgggaacggtgcattggaacgcggattccccgtgccaagagtgacgtaagtaccgcctatagactctataggcacacccctttggctcttatgcatgaacggtggagggcagtgtagtctgagcagtactcgttgctgccgcgcgcgccaccagacataatagctgacagactaacagactgttcctttccatgggtcttttctgcaggccacc

SEQ ID NO: 138 - DNA, 616 bp, Artificial Sequence
  Description of Artificial Sequence: Synthetic polynucleotide
  SP0286
caccgcggtggcggccgtccgccctcggcaccatcctcacgacacccaaatatggcgacgggtgaggaatggtggggagttatttttagagcggtgaggaaggtgggcaggcagcaggtgttggcgctctaaaaataactcccgggagttatttttagagcggaggaatggtggacacccaaatatggcgacggttcctcacccgtcgccatatttgggtgtccgccctcggccggggccgcattcctgggggccgggcggtgctcccgcccgcctcgataaaaggctccggggccggcggcggcccactcagatcgcctggagacgccatccacgctgttttgacctccatagaagacaccgggaccgatccagcctccgcggccgggaacggtgcattggaacgcggattccccgtgccaagagtgacgtaagtaccgcctatagactctataggcacacccctttggctcttatgcatgaacggtggagggcagtgtagtctgagcagtactcgttgctgccgcgcgcgccaccagacataatagctgacagactaacagactgttcctttccatgggtcttttctgcagtcaccgtccttgacacggccacc

SEQ ID NO: 139 - DNA, 562 bp, Artificial Sequence
  Description of Artificial Sequence: Synthetic polynucleotide
  SP0305
gtttcttagcagctgctgctgtgtccaaggcttggaattgctgtggtgaatctaaaactgtctcagtagtggtgagctgacctcacccaagttcaaagccctactctgcctgatccttttttcctgagcctcagagctaaaatgcccccgagctctttcctattggctggaaagacgaattgaagttcccttgcccatgttaggaggtgtacgcctcctgaactaaagatagaaacagctggcccttccaggcagctaaaagcctccagactaagaggtgttccccattcgggccactacgggtctaggctgcccatgtaaggaggcaaggcctggggacacccgagatgcctggttataattaacccagacatgtggctgccccccccccccaacacctgctgcctgagcctcacccccaccccggtgcctgggtcttaggctctgtacaccatggaggagaagctcgctctaaaaataaccctgccaccgcctgctgccacggccggccgtataaatagaggcgaggagcagctgggctctcttggcagtcaccgccacc

SEQ ID NO: 140 - DNA, 500 bp, Artificial Sequence
  Description of Artificial Sequence: Synthetic polynucleotide
  SP0306
ctctgtctcctcaggtgcctggctcccagtccccagaacgcctctcctgtaccttgcttcctagctgggcctttccttctcctctataaataccagctctggtatttcgccttggcagctgttgctgctagggagacggctggcttgacatgcatctcctgacaaaacacaaacccgtggtgtgagtgggtgtgggcggtgtgagtagggggatgaatcagagagggggcgccactacgggtctaggctgcccatgtaaggaggcaaggcctggggacacccgagatgcctggttataattaacccagacatgtggctgccccccccccccaacacctgctgcctgagcctcacccccaccccggtgcctgggtcttaggctctgtacaccatggaggagaagctcgctctaaaaataaccctgccaccgcctgctgccacggccggccgtataaatagaggcgaggagcagctgggctctcttggcagtcaccgccacc

SEQ ID NO: 141 - DNA, 554 bp, Artificial Sequence
  Description of Artificial Sequence: Synthetic polynucleotide
  SP0307
gggccccacagcagctgggggcatttatgggccttcctataaacttctgagagggtaactttatcctgcttctttcagccaagtatcctcctccagcagctggtcacaaagctggttaatctcccagagtgctcagcttaaaacccgtgactcacagcacagccagtgtgggggagggggtggctgcctccaatacgtggcgcccagagtcagctgttctggggccttctctggtttctccaactgagtcctgaggtttggggccttgtcttccttcctggagtgccactacgggtctaggctgcccatgtaaggaggcaaggcctggggacacccgagatgcctggttataattaacccagacatgtggctgccccccccccccaacacctgctgcctgagcctcacccccaccccggtgcctgggtcttaggctctgtacaccatggaggagaagctcgctctaaaaataaccctgccaccgcctgctgccacggccggccgtataaatagaggcgaggagcagctgggctctcttggcagtcaccgccacc

SEQ ID NO: 142 - DNA, 636 bp, Artificial Sequence
  Description of Artificial Sequence: Synthetic polynucleotide
  SP0309
gccactacgggtctaggctgcccatgtaaggaggcaaggcctggggacacccgagatgcctggttataattaacccagacatgtggctgccccccccccccaacacctgctgcctgagcctcacccccaccccggtgcctgggtcttaggctctgtacaccatggaggagaagctcgctctaaaaataaccctggccactacgggtctaggctgcccatgtaaggaggcaaggcctggggacacccgagatgcctggttataattaacccagacatgtggctgccccccccccccaacacctgctgcctgagcctcacccccaccccggtgcctgggtcttaggctctgtacaccatggaggagaagctcgctctaaaaataaccctgataaatacccgctctggtatttggggttctcctctataaatacccgctctggtatttggggttggcagctgttgcgggatcttgcagctgtcaggggaggggaggcgggggctgatgtcaggagggatacaaatagtgccgacggctgggggccctgtctcccctcgccgcatccactctccggccggccgcctgcccgccgcctcctccgtgcgcccgccagcctcgcccgcgccgtcaccgccacc

SEQ ID NO: 143 - DNA, 442 bp, Artificial Sequence
  Description of Artificial Sequence: Synthetic polynucleotide
  SP0310
gccactacgggtctaggctgcccatgtaaggaggcaaggcctggggacacccgagatgcctggttataattaacccagacatgtggctgccccccccccccaacacctgctgcctgagcctcacccccaccccggtgcctgggtcttaggctctgtacaccatggaggagaagctcgctctaaaaataaccctgataaatacccgctctggtatttggggttctcctctataaatacccgctctggtatttggggttggcagctgttgcgggatcttgcagctgtcaggggaggggaggcgggggctgatgtcaggagggatacaaatagtgccgacggctgggggccctgtctcccctcgccgcatccactctccggccggccgcctgcccgccgcctcctccgtgcgcccgccagcctcgcccgcgccgtcaccgccacc

SEQ ID NO: 144 - DNA, 318 bp, Artificial Sequence
  Description of Artificial Sequence: Synthetic polynucleotide
  SP0311
gccactacgggtctaggctgcccatgtaaggaggcaaggcctggggacacccgagatgcctggttataattaacccagacatgtggctgccccccccccccaacacctgctgcctgagcctcacccccaccccggtgcctgggtcttaggctctgtacaccatggaggagaagctcgctctaaaaataaccctgttctcctctataaatacccgctctggtatttggggttggcagctgttgccaccgcctgctgccacggccggccgtataaatagaggcgaggagcagctgggctctcttggcagtcaccgccacc

SEQ ID NO: 145 - DNA, 501 bp, Artificial Sequence
  Description of Artificial Sequence: Synthetic polynucleotide
  SP0312
cccacccatgcctcctcaggtaccccctgccccccacagctcctctcctgtgccttgtttcccagccatgcgttctcctctataaatacccgctctggtatttggggttggcagctgttgctgccagggagatggttgggttgacatgcggctcctgacaaaacacaaacccctggtgtgtgtgggcgtgggtggtgtgagtagggggatgaatcagggagggggcggggggccactacgggtctaggctgcccatgtaaggaggcaaggcctggggacacccgagatgcctggttataattaacccagacatgtggctgccccccccccccaacacctgctgcctgagcctcacccccaccccggtgcctgggtcttaggctctgtacaccatggaggagaagctcgctctaaaaataaccctgccaccgcctgctgccacggccggccgtataaatagaggcgaggagcagctgggctctcttggcagtcaccgccacc

SEQ ID NO: 146 - DNA, 395 bp, Artificial Sequence
  Description of Artificial Sequence: Synthetic polynucleotide
  SP0313
gccactacgggtctaggctgcccatgtaaggaggcaaggcctggggacacccgagatgcctggttataattaacccagacatgtggctgccccccccccccaacacctgctgcctgagcctcacccccaccccggtgcctgggtcttaggctctgtacaccatggaggagaagctcgctctaaaaataaccctgcccctgccccccacagctcctctcctgtgccttgtttcccagccatgcgttctcctctataaatacccgctctggtatttggggttggcagctgttgctgccagggagatggttgggttgacatgccaccgcctgctgccacggccggccgtataaatagaggcgaggagcagctgggctctcttggcagtcaccgccacc

SEQ ID NO: 147 - DNA, 334 bp, Artificial Sequence
  Description of Artificial Sequence: Synthetic polynucleotide
  SP0314
gccactacgggtctaggctgcccatgtaaggaggcaaggcctggggacacccgagatgcctggttataattaacccagacatgtggctgccccccccccccaacacctgctgcctgagcctcacccccaccccggtgcctgggtcttaggctctgtacaccatggaggagaagctcgctctaaaaataaccctgctctataaatacccgctctggtatttggggttctctataaatacccgctctggtatttggggttccaccgcctgctgccacggccggccgtataaatagaggcgaggagcagctgggctctcttggcagtcaccgccacc

SEQ ID NO: 148 - DNA, 204 bp, Artificial Sequence
  Description of Artificial Sequence: Synthetic polynucleotide
  SP0315
ctagactagcatgctgcccatgtaaggaggcaaggcctggggacacccgagatgcctggttataattaacccagacatgtggctgcccccccccccccaacacctgctgcctctaaaaataaccctgcccaccgcctgctgccacggccggccgtataaatagaggcgaggagcagctgggctctcttggcagtcaccgccacc

SEQ ID NO: 149 - DNA, 376 bp, Artificial Sequence
  Description of Artificial Sequence: Synthetic polynucleotide
  SP0316
ctagactagcatgctgcccatgtaaggaggcaaggcctggggacacccgagatgcctggttataattaacccagacatgtggctgcccccccccccccaacacctgctgcctctaaaaataaccctgcataaatacccgctctggtatttggggttctcctctataaatacccgctctggtatttggggttggcagctgttgcgggatcttgcagctgtcaggggaggggaggcgggggctgatgtcaggagggatacaaatagtgccgacggctgggggccctgtctcccctcgccgcatccactctccggccggccgcctgcccgccgcctcctccgtgcgcccgccagcctcgcccgcgccgtcaccgccacc

SEQ ID NO: 150 - DNA, 944 bp, Artificial Sequence
  Description of Artificial Sequence: Synthetic polynucleotide
  SP0320
gtttcttagcagctgctgctgtgtccaaggcttggaattgctgtggtgaatctaaaactgtctcagtagtggtgagctgacctcacccaagttcaaagccctactctgcctgatccttttttcctgagcctcagagctaaaatgcccccgagctctttcctattggctggaaagacgaattgaagttcccttgcccatgttaggaggtgtacgcctcctgaactaaagatagaaacagctggcccttccaggcagctaaaagcctccagactaagaggtgttccccattcgggccactacgggtctaggctgcccatgtaaggaggcaaggcctggggacacccgagatgcctggttataattaacccagacatgtggctgccccccccccccaacacctgctgcctgagcctcacccccaccccggtgcctgggtcttaggctctgtacaccatggaggagaagctcgctctaaaaataaccctgataaatacccgctctggtatttggggttctcctctataaatacccgctctggtatttggggttggcagctgttgcgggatcttgcagctgtcaggggaggggaggcgggggctgatgtcaggagggatacaaatagtgccgacggctgggggccctgtctcccctcgctcagatcgcctggagacgccatccacgctgttttgacctccatagaagacaccgggaccgatccagcctccgcggccgggaacggtgcattggaacgcggattccccgtgccaagagtgacgtaagtaccgcctatagactctataggcacacccctttggctcttatgcatgaacggtggagggcagtgtagtctgagcagtactcgttgctgccgcgcgcgccaccagacataatagctgacagactaacagactgttcctttccatgggtcttttctgcaggccacc

SEQ ID NO: 151 - DNA, 661 bp, Artificial Sequence
  Description of Artificial Sequence: Synthetic polynucleotide
  SP0322
agactggggcaggtgcaggctggattgggtttccagaggctatatatataaaggctgccgggagccccagggccgctccctgagggcacaacactgtgggggcccagccaggcccacattcctttccagaggccagctctccatttatagcccctgggcagagcagccaccgcggtggcggccgtccgccctcggcaccatcctcacgacacccaaatatggcgacgggtgaggaatggtggggagttatttttagagcggtgaggaaggtgggcaggcagcaggtgttggcgctctaaaaataactcccgggagttatttttagagcggaggaatggtggacacccaaatatggcgacggttcctcacccgtcgccatatttgggtgtccgccctcggccggggccataaatacccgctctggtatttggggttctcctctataaatacccgctctggtatttggggttggcagctgttgcgggatcttgcagctgtcaggggaggggaggcgggggctgatgtcaggagggatacaaatagtgccgacggctgggggccctgtctcccctcgccgcatccactctccggccggccgcctgcccgccgcctcctccgtgcgcccgccagcctcgcccgcgccgtcaccgcggccgccacc

SEQ ID NO: 152 - DNA, 613 bp, Artificial Sequence
  Description of Artificial Sequence: Synthetic polynucleotide
  SP0323
agactggggcaggtgcaggctggattgggtttccagaggctatatatataaaggctgccgggagcccacattcctttccagaggccagctctccatttatagcccctgggcagagcagccaccgcggtggcggccgtccgccctcggcaccatcctcacgacacccaaatatggcgacgggtgaggaatggtggggagttatttttagagcggtgaggaaggtgggcaggcagcaggtgttggcgctctaaaaataactcccgggagttatttttagagcggaggaatggtggacacccaaatatggcgacggttcctcacccgtcgccatatttgggtgtccgccctcggccggggccataaatacccgctctggtatttggggttctcctctataaatacccgctctggtatttggggttggcagctgttgcgggatcttgcagctgtcaggggaggggaggcgggggctgatgtcaggagggatacaaatagtgccgacggctgggggccctgtctcccctcgccgcatccactctccggccggccgcctgcccgccgcctcctccgtgcgcccgccagcctcgcccgcgccgtcaccgcggccgccacc

SEQ ID NO: 153 - DNA, 407 bp, Artificial Sequence
  Description of Artificial Sequence: Synthetic polynucleotide
  SP0324
agactggggcaggtgcaggctggattgggtttccagaggctatatatataaaggctgccgggagccccagggccgctccctgagggcacaacactgtgggggcccagccaggcccacattcctttccagaggccagctctccatttatagcccctgggcagagcagcttctcctctataaatacccgctctggtatttggggttggcagctgttgctgccagggagatggttgggttgacgggatcttgcagctgtcaggggaggggaggcgggggctgatgtcaggagggatacaaatagtgccgacggctgggggccctgtctcccctcgccgcatccactctccggccggccgcctgcccgccgcctcctccgtgcgcccgccagcctcgcccgcgccgtcacc

SEQ ID NO: 154 - DNA, 409 bp, Artificial Sequence
  Description of Artificial Sequence: Synthetic polynucleotide
  SP0325
agactggggcaggtgcaggctggattgggtttccagaggctatatatataaaggctgccgggagccccagggccgctccctgagggcacaacactgtgggggcccagccaggcccacattcctttccagaggccagctctccatttatagcccctgggcagagcagcataaatacccgctctggtatttggggttctcctctataaatacccgctctggtatttggggttggcagctgttgcgggatcttgcagctgtcaggggaggggaggcgggggctgatgtcaggagggatacaaatagtgccgacggctgggggccctgtctcccctcgccgcatccactctccggccggccgcctgcccgccgcctcctccgtgcgcccgccagcctcgcccgcgccgtcacc

SEQ ID NO: 155 - DNA, 483 bp, Artificial Sequence
  Description of Artificial Sequence: Synthetic polynucleotide
  SP0326
caccgcggtggcggccgtccgccctcggcaccatcctcacgacacccaaatatggcgacgggtgaggaatggtggggagttatttttagagcggtgaggaaggtgggcaggcagcaggtgttggcgctctaaaaataactcccgggagttatttttagagcggaggaatggtggacacccaaatatggcgacggttcctcacccgtcgccatatttgggtgtccgccctataaatacccgctctggtatttggggttctcctctataaatacccgctctggtatttggggttggcagctgttgcgggatcttgcagctgtcaggggaggggaggcgggggctgatgtcaggagggatacaaatagtgccgacggctgggggccctgtctcccctcgccgcatccactctccggccggccgcctgcccgccgcctcctccgtgcgcccgccagcctcgcccgcgccgtcaccgcggccgccacc

SEQ ID NO: 156 - DNA, 538 bp, Artificial Sequence
  Description of Artificial Sequence: Synthetic polynucleotide
  SP0327
agactggggcaggtgcaggctggattgggtttccagaggctatatatataaaggctgccgggagccccagggccgctccctgagggcacaacactgtgggggcccagccaggcccacattcctttccagaggccagctctccatttatagcccctgggcagagcagccaccgcggtggcggccgtccgccctcggcaccatcctcacgacacccaaatatggcgacgggtgaggaatggtggggagttatttttagagcggtgaggaaggtgggcaggcagcaggtgttggcgctctaaaaataactcccgggagttatttttagagcggaggaatggtggacacccaaatatggcgacggttcctcacccgtcgccatatttgggtgtccgccctcggccggggccgcattcctgggggccgggcggtgctcccgcccgcctcgataaaaggctccggggccggcggcggcccacgagctacccggaggagcgggaggcgccaagctctagaactagtggatcccgcggccgccacc

SEQ ID NO: 157 - DNA, 822 bp, Artificial Sequence
  Description of Artificial Sequence: Synthetic polynucleotide
  SP0328
gggccccacagcagctgggggcatttatgggccttcctataaacttctgagagggtaactttatcctgcttctttcagccaagtatcctcctccagcagctggtcacaaagctggttaatctcccagagtgctcagcttaaaacccgtgactcacagcacagccagtgtgggggagggggtggctgcctccaatacgtggcgcccagagtcagctgttctggggccttctctggtttctccaactgagtcctgaggtttggggccttgtcttccttcctggagtagactggggcaggtgcaggctggattgggtttccagaggctatatatataaaggctgccgggagccccagggccgctccctgagggcacaacactgtgggggcccagccaggcccacattcctttccagaggccagctctccatttatagcccctgggcagagcagccaccgcggtggcggccgtccgccctcggcaccatcctcacgacacccaaatatggcgacgggtgaggaatggtggggagttatttttagagcggtgaggaaggtgggcaggcagcaggtgttggcgctctaaaaataactcccgggagttatttttagagcggaggaatggtggacacccaaatatggcgacggttcctcacccgtcgccatatttgggtgtccgccctcggccggggccgcattcctgggggccgggcggtgctcccgcccgcctcgataaaaggctccggggccggcggcggcccacgagctacccggaggagcgggaggcgccaagctctagaactagtggatcccgcggccgccacc

SEQ ID NO: 158 - DNA, 324 bp, Artificial Sequence
  Description of Artificial Sequence: Synthetic polynucleotide
  SP0329
acacccaaatatggcgacgggtgaggaatggtggggagttatttttagagcggtgaggaaggtgggcaggcagcaggtgttggcgctctaaaaataactcccgggagttatttttagagcggaggaatggtggacacccaaatatggcgacggttcctcacccgtcgccatatttgggtgtccgccctcggccggggccgcattcctgggggccgggcggtgctcccgcccgcctcgataaaaggctccggggccggcggcggcccacgagctacccggaggagcgggaggcgccaagctctagaactagtggatcccgccacc

SEQ ID NO: 159 - DNA, 365 bp, Artificial Sequence
  Description of Artificial Sequence: Synthetic polynucleotide
  SP0330
caccgcggtggcggccgtccgccctcggcaccatcctcacgacacccaaatatggcgacgggtgaggaatggtggggagttatttttagagcgtaaacgagctattagttgcagcaggtgttggcgctctaaaaataactcccgggagttatttttagagcggaggaatggtggacacccaaatatggcgacggttcctcacccgtcgccatatttgggtgtccgccctcggccggggccgcattcctgggggccgggcggtgctcccgcccgcctcgataaaaggctccggggccggcggcggcccacgagctacccggaggagcgggaggcgccaagctctagaactagtggatcccgccacc

SEQ ID NO: 160 - DNA, 365 bp, Artificial Sequence
  Description of Artificial Sequence: Synthetic polynucleotide
  SP0331
caccgcggtggcggccgtccgccctcggcaccatcctcacgacacccaaatatggcgacgggtgaggaatggtggggagttatttttagagcggtgaggaaggtgggcaggcagcaggtgttggcgctctaaaaataactcccgggagttatttttagagcgaggtaaacgagctattagttatgaggtccgtagattgaacccgtcgccatatttgggtgtccgccctcggccggggccgcattcctgggggccgggcggtgctcccgcccgcctcgataaaaggctccggggccggcggcggcccacgagctacccggaggagcgggaggcgccaagctctagaactagtggatcccgccacc

SEQ ID NO: 161 - DNA, 565 bp, Artificial Sequence
  Description of Artificial Sequence: Synthetic polynucleotide
  SP0332
gccactacgggtctaggctgcccatgtaaggaggcaaggcctggggacacccgagatgcctggttataattaacccagacatgtggctgccccccccccccaacacctgctgcctgagcctcacccccaccccggtgcctgggtcttaggctctgtacaccatggaggagaagctcgctctaaaaataaccctgcaccgcggtggcggccgtccgccctcggcaccatcctcacgacacccaaatatggcgacgggtgaggaatggtggggagttatttttagagcggtgaggaaggtgggcaggcagcaggtgttggcgctctaaaaataactcccgggagttatttttagagcggaggaatggtggacacccaaatatggcgacggttcctcacccgtcgccatatttgggtgtccgccctcggccggggccgcattcctgggggccgggcggtgctcccgcccgcctcgataaaaggctccggggccggcggcggcccacgagctacccggaggagcgggaggcgccaagctctagaactagtggatcccgcggccgccacc

SEQ ID NO: 162 - DNA, 543 bp, Artificial Sequence
  Description of Artificial Sequence: Synthetic polynucleotide
  SP0333
gccactacgggtctaggctgcccatgtaaggaggcaaggcctggggacacccgagatgcctggttataattaacccagacatgtggctgccccccccccccaacacctgctgcctgagcctcacccccaccccggtgcctgggtcttaggctctgtacaccatggaggagaagctcgctctaaaaataaccctggtttcttagcagctgctgctgtgtccaaggcttggaattgctgtggtgaatctaaaactgtctcagtagtggtgagctgacctcacccaagttcaaagccctactctgcctgatccttttttcctgagcctcagagctaaaatgcccccgagctctttcctattggctggaaagacgaattgaagttcccttgcccatgttaggaggtgtacgcctcctgaactaaagatagaaacagctggcccttccaggcagctaaaagcctccagactaagaggtgttccccattcggcagccagactccttgaaataccctttcagtaatcattcaaccaacgcttccgccacc

SEQ ID NO: 163 - DNA, 362 bp, Artificial Sequence
  Description of Artificial Sequence: Synthetic polynucleotide
  SP0334
gccactacgggtctaggctgcccatgtaaggaggcaaggcctggggacacccgagatgcctggttataattaacccagacatgtggctgccccccccccccaacacctgctgcctgagcctcacccccaccccggtgcctgggtcttaggctctgtacaccatggaggagaagctcgctctaaaaataaccctgcgggatcttgcagctgtcaggggaggggaggcgggggctgatgtcaggagggatacaaatagtgccgacggctgggggccctgtctcccctcgccgcatccactctccggccggccgcctgcccgccgcctcctccgtgcgcccgccagcctcgcccgcgccgtcacc

SEQ ID NO: 164 - DNA, 715 bp, Artificial Sequence
  Description of Artificial Sequence: Synthetic polynucleotide
  SP0335
gccactacgggtctaggctgcccatgtaaggaggcaaggcctggggacacccgagatgcctggttataattaacccagacatgtggctgccccccccccccaacacctgctgcctgagcctcacccccaccccggtgcctgggtcttaggctctgtacaccatggaggagaagctcgctctaaaaataaccctgtcaaagccctactctgcctgatccttttttcctgagcctcagagctaaaatgcccccgagctctttcctattggctggaaagacgaattgaagttcccttgcccatgttaggaggtgtacgcctcctgaactaaagatagaaacagctggcccttccaggcagctaaaagcctccagactaagaggtgttccccattcggccatgttcccggcgaagggccagctgtcccccgccagctagactcagcacttagtttaggaaccagtgagcaagtcagcccttggggcagcccatacaaggccatggggctgggcaagctgcacgcctgggtccggggtgggcacggtgcccgggcaacgagctgaaagctcatctactctcaggggcccctccctggggacagcccctcctggctagtcacaccctgtaggctcctctatataacccaggggcacaggggctgcccccgggtcaccaccacctccacagcacagacagacactcaggagccagcgccacc

SEQ ID NO: 165 - DNA, 521 bp, Artificial Sequence
  Description of Artificial Sequence: Synthetic polynucleotide
  SP0336
tcaaagccctactctgcctgatccttttttcctgagcctcagagctaaaatgcccccgagctctttcctattggctggaaagacgaattgaagttcccttgcccatgttaggaggtgtacgcctcctgaactaaagatagaaacagctggcccttccaggcagctaaaagcctccagactaagaggtgttccccattcggccatgttcccggcgaagggccagctgtcccccgccagctagactcagcacttagtttaggaaccagtgagcaagtcagcccttggggcagcccatacaaggccatggggctgggcaagctgcacgcctgggtccggggtgggcacggtgcccgggcaacgagctgaaagctcatctactctcaggggcccctccctggggacagcccctcctggctagtcacaccctgtaggctcctctatataacccaggggcacaggggctgcccccgggtcaccaccacctccacagcacagacagacactcaggagccagcgccacc

SEQ ID NO: 166 - DNA, 618 bp, Artificial Sequence
  Description of Artificial Sequence: Synthetic polynucleotide
  SP0337
gccactacgggtctaggctgcccatgtaaggaggcaaggcctggggacacccgagatgcctggttataattaacccagacatgtggctgccccccccccccaacacctgctgcctgagcctcacccccaccccggtgcctgggtcttaggctctgtacaccatggaggagaagctcgctctaaaaataaccctgtcaaagccctactctgcctgatccttttttcctgagcctcagagctaaaatgcccccgagctctttcctattggctggaaagacgaattgaagttcccttgcccatgttaggaggtgtacgcctcctgaactaaagatagaaacagctggcccttccaggcagctaaaagcctccagactaagaggtgttccccattcggcccggcagacgctccttatacggcccggcctcgctcacctgggccgcggccaggagcgccttctttgggcagcgccgggccggggccgcgccgggcccgacacccaaatatggcgacggccggggccgcattcctgggggccgggcggcgctcccgcccgcctcgataaaaggctccggggccggcggcggcccacgagctacccggaggagcgggaggccacc

SEQ ID NO: 167 - DNA, 729 bp, Artificial Sequence
  Description of Artificial Sequence: Synthetic polynucleotide
  SP0338
agactggggcaggtgcaggctggattgggtttccagaggctatatatataaaggctgccgggagccccagggccgctccctgagggcacaacactgtgggggcccagccaggcccacattcctttccagaggccagctctccatttatagcccctgggcagagcagcgccactacgggtctaggctgcccatgtaaggaggcaaggcctggggacacccgagatgcctggttataattaacccagacatgtggctgccccccccccccaacacctgctgcctgagcctcacccccaccccggtgcctgggtcttaggctctgtacaccatggaggagaagctcgctctaaaaataaccctgtcaaagccctactctgcctgatccttttttcctgagcctcagagctaaaatgcccccgagctctttcctattggctggaaagacgaattgaagttcccttgcccatgttaggaggtgtacgcctcctgaactaaagatagaaacagctggcccttccaggcagctaaaagcctccagactaagaggtgttccccattcggcgggatcttgcagctgtcaggggaggggaggcgggggctgatgtcaggagggatacaaatagtgccgacggctgggggccctgtctcccctcgccgcatccactctccggccggccgcctgcccgccgcctcctccgtgcgcccgccagcctcgcccgcgccgtcacc

SEQ ID NO: 168 - DNA, 610 bp, Artificial Sequence
  Description of Artificial Sequence: Synthetic polynucleotide
  SP0339
gccactacgggtctaggctgcccatgtaaggaggcaaggcctggggacacccgagatgcctggttataattaacccagacatgtggctgccccccccccccaacacctgctgcctgagcctcacccccaccccggtgcctgggtcttaggctctgtacaccatggaggagaagctcgctctaaaaataaccctgttctcctctataaatacccgctctggtatttggggttggcagctgttgtcaaagccctactctgcctgatccttttttcctgagcctcagagctaaaatgcccccgagctctttcctattggctggaaagacgaattgaagttcccttgcccatgttaggaggtgtacgcctcctgaactaaagatagaaacagctggcccttccaggcagctaaaagcctccagactaagaggtgttccccattcggcgggatcttgcagctgtcaggggaggggaggcgggggctgatgtcaggagggatacaaatagtgccgacggctgggggccctgtctcccctcgccgcatccactctccggccggccgcctgcccgccgcctcctccgtgcgcccgccagcctcgcccgcgccgtcacc

SEQ ID NO: 169 - DNA, 654 bp, Artificial Sequence
  Description of Artificial Sequence: Synthetic polynucleotide
  SP0340
gccactacgggtctaggctgcccatgtaaggaggcaaggcctggggacacccgagatgcctggttataattaacccagacatgtggctgccccccccccccaacacctgctgcctgagcctcacccccaccccggtgcctgggtcttaggctctgtacaccatggaggagaagctcgctctaaaaataaccctgcccggcagacgctccttatacggcccggcctcgctcacctgggccgcggccaggagcgccttctttgggcagcgccgggccggggccgcgccgggcccgacacccaaatatggcgacggccggggccgcattcctgggggccgggcggcgctcccgcccgcctcgataaaaggctccggggccggcggcggcccacgagctacccggaggagcgggagataaatacccgctctggtatttggggttctcctctataaatacccgctctggtatttggggttggcagctgttgcgggatcttgcagctgtcaggggaggggaggcgggggctgatgtcaggagggatacaaatagtgccgacggctgggggccctgtctcccctcgccgcatccactctccggccggccgcctgcccgccgcctcctccgtgcgcccgccagcctcgcccgcgccgtcacc

SEQ ID NO: 170 - DNA, 924 bp, Artificial Sequence
  Description of Artificial Sequence: Synthetic polynucleotide
  SP0341
gccactacgggtctaggctgcccatgtaaggaggcaaggcctggggacacccgagatgcctggttataattaacccagacatgtggctgccccccccccccaacacctgctgcctgagcctcacccccaccccggtgcctgggtcttaggctctgtacaccatggaggagaagctcgctctaaaaataaccctgtcaaagccctactctgcctgatccttttttcctgagcctcagagctaaaatgcccccgagctctttcctattggctggaaagacgaattgaagttcccttgcccatgttaggaggtgtacgcctcctgaactaaagatagaaacagctggcccttccaggcagctaaaagcctccagactaagaggtgttccccattcgggccgcgaagaccggaagctggggcggccccgggccgcgcgcgctgggcctgggaggcgaaactcagcttccttcgtttccgacttttccatccgcgtcctccacttccccgttccgccctcccccattgccaacattctggctgagtcacggcgccccagagcgcgccaggctgggggaaaggagcagaagggagggccctagcgacccgcgggatgtggtccgagtcacgtccgaggggggtggggagggatcgtgttctcggcgcccgccccttcctagcgcggcctctgggctgcgcctctcgggggcggcccgtagcccagtccgtcgcctgccattggacgccgcccgctcctcgtaaaggaaaaagctcggcggagggcggagtggtgcctttaaaaggccgggcgccgccttccgcctgcccgcctcctgcgccgccccttccgaggctaaatcggctgcgttcctctcggaacgcgccgcagaaggggtcctggtgacgagtcccgcgttctctccgccacc

SEQ ID NO: 171 - DNA, 652 bp, Artificial Sequence
  Description of Artificial Sequence: Synthetic polynucleotide
  SP0343
gccactacgggtctaggctgcccatgtaaggaggcaaggcctggggacacccgagatgcctggttataattaacccagacatgtggctgccccccccccccaacacctgctgcctgagcctcacccccaccccggtgcctgggtcttaggctctgtacaccatggaggagaagctcgctctaaaaataaccctgataaatacccgctctggtatttggggttctcctctataaatacccgctctggtatttggggttggcagctgttgcgggatcttgcagctgtcaggggaggggaggcgggggctgatgtcaggagggatacaaatagtgccgacggctgggggccctgtctcccctcgctcagatcgcctggagacgccatccacgctgttttgacctccatagaagacaccgggaccgatccagcctccgcggccgggaacggtgcattggaacgcggattccccgtgccaagagtgacgtaagtaccgcctatagactctataggcacacccctttggctcttatgcatgaacggtggagggcagtgtagtctgagcagtactcgttgctgccgcgcgcgccaccagacataatagctgacagactaacagactgttcctttccatgggtcttttctgcaggccacc

SEQ ID NO: 172 - DNA, 693 bp, Artificial Sequence
  Description of Artificial Sequence: Synthetic polynucleotide
  SP0345
gggccccacagcagctgggggcatttatgggccttcctataaacttctgagagggtaactttatcctgcttctttcagccaagtatcctcctccagcagctggtcacaaagctggttaatctcccagagtgctcagcttaaaacccgtgactcacagcacagccagtgtgggggagggggtggctgcctccaatacgtggcgcccagagtcagctgttctggggccttctctggtttctccaactgagtcctgaggtttggggccttgtcttccttcctggagtcaccgcggtggcggccgtccgccctcggcaccatcctcacgacacccaaatatggcgacgggtgaggaatggtggggagttatttttagagcggtgaggaaggtgggcaggcagcaggtgttggcgctctaaaaataactcccgggagttatttttagagcggaggaatggtggacacccaaatatggcgacggttcctcacccgtcgccatatttgggtgtccgccctcgggatcttgcagctgtcaggggaggggaggcgggggctgatgtcaggagggatacaaatagtgccgacggctgggggccctgtctcccctcgccgcatccactctccggccggccgcctgcccgccgcctcctccgtgcgcccgccagcctcgcccgcgccgtcaccgcggccgccacc

SEQ ID NO: 173 - DNA, 576 bp, Artificial Sequence
  Description of Artificial Sequence: Synthetic polynucleotide
  SP0346
agactggggcaggtgcaggctggattgggtttccagaggctatatatataaaggctgccgggagccccagggccgctccctgagggcacaacactgtgggggcccagccaggcccacattcctttccagaggccagctctccatttatagcccctgggcagagcagccaccgcggtggcggccgtccgccctcggcaccatcctcacgacacccaaatatggcgacgggtgaggaatggtggggagttatttttagagcggtgaggaaggtgggcaggcagcaggtgttggcgctctaaaaataactcccgggagttatttttagagcggaggaatggtggacacccaaatatggcgacggttcctcacccgtcgccatatttgggtgtccgccctcgggatcttgcagctgtcaggggaggggaggcgggggctgatgtcaggagggatacaaatagtgccgacggctgggggccctgtctcccctcgccgcatccactctccggccggccgcctgcccgccgcctcctccgtgcgcccgccagcctcgcccgcgccgtcaccgcggccgccacc

SEQ ID NO: 174 - DNA, 606 bp, Artificial Sequence
  Description of Artificial Sequence: Synthetic polynucleotide
  SP0347
ctctgtctcctcaggtgcctggctcccagtccccagaacgcctctcctgtaccttgcttcctagctgggcctttccttctcctctataaataccagctctggtatttcgccttggcagctgttgctgctagggagacggctggcttgacatgcatctcctgacaaaacacaaacccgtggtgtgagtgggtgtgggcggtgtgagtagggggatgaatcagagagggggcctagactagcatgctgcccatgtaaggaggcaaggcctggggacacccgagatgcctggttataattaacccagacatgtggctgcccccccccccccaacacctgctgcctctaaaaataaccctgcataaatacccgctctggtatttggggttctcctctataaatacccgctctggtatttggggttggcagctgttgcgggatcttgcagctgtcaggggaggggaggcgggggctgatgtcaggagggatacaaatagtgccgacggctgggggccctgtctcccctcgccgcatccactctccggccggccgcctgcccgccgcctcctccgtgcgcccgccagcctcgcccgcgccgtcaccgccacc

SEQ ID NO: 175 - DNA, 575 bp, Artificial Sequence
  Description of Artificial Sequence: Synthetic polynucleotide
  SP0348
ctctgtctcctcaggtgcctggctgcttcctagctgggcctttccttctcctctataaataccagctctggtatttcgccttggcagctgttgctgctagggagacggctggcttgacatgcatctcctgacaaaacacaaacccgtggtgtgagtgggtgtgggcggtgtgagtagggggatgaatcagagagggggcctagactagcatgctgcccatgtaaggaggcaaggcctggggacacccgagatgcctggttataattaacccagacatgtggctgcccccccccccccaacacctgctgcctctaaaaataaccctgcataaatacccgctctggtatttggggttctcctctataaatacccgctctggtatttggggttggcagctgttgcgggatcttgcagctgtcaggggaggggaggcgggggctgatgtcaggagggatacaaatagtgccgacggctgggggccctgtctcccctcgccgcatccactctccggccggccgcctgcccgccgcctcctccgtgcgcccgccagcctcgcccgcgccgtcaccgccacc

SEQ ID NO: 176 - DNA, 907 bp, Artificial Sequence
  Description of Artificial Sequence: Synthetic polynucleotide
  SP0349
ctctgtctcctcaggtgcctggctcccagtccccagaacgcctctcctgtaccttgcttcctagctgggcctttccttctcctctataaataccagctctggtatttcgccttggcagctgttgctgctagggagacggctggcttgacatgcatctcctgacaaaacacaaacccgtggtgtgagtgggtgtgggcggtgtgagtagggggatgaatcagagagggggcgccactacgggtctaggctgcccatgtaaggaggcaaggcctggggacacccgagatgcctggttataattaacccagacatgtggctgccccccccccccaacacctgctgcctgagcctcacccccaccccggtgcctgggtcttaggctctgtacaccatggaggagaagctcgctctaaaaataaccctgcaccgcggtggcggccgtccgccctcggcaccatcctcacgacacccaaatatggcgacgggtgaggaatggtggggagttatttttagagcggtgaggaaggtgggcaggcagcaggtgttggcgctctaaaaataactcccgggagttatttttagagcggaggaatggtggacacccaaatatggcgacggttcctcacccgtcgccatatttgggtgtccgccctataaatacccgctctggtatttggggttctcctctataaatacccgctctggtatttggggttggcagctgttgcgggatcttgcagctgtcaggggaggggaggcgggggctgatgtcaggagggatacaaatagtgccgacggctgggggccctgtctcccctcgccgcatccactctccggccggccgcctgcccgccgcctcctccgtgcgcccgccagcctcgcccgcgccgtcaccgcggccgccacc

SEQ ID NO: 177 - DNA, 727 bp, Artificial Sequence
  Description of Artificial Sequence: Synthetic polynucleotide
  SP0350
gggccccacagcagctgggggcatttatgggccttcctataaacttctgagagggtaactttatcctgcttctttcagccaagtatcctcctccagcagctggtcacaaagctggttaatctcccagagtgctcagcttaaaacccgtgactcacagcacagccagtgtgggggagggggtggctgcctccaatacgtggcgcccagagtcagctgttctggggccttctctggtttctccaactgagtcctgaggtttggggccttgtcttccttcctggagtttctcctctataaatacccgctctggtatttggggttggcagctgttgctgccagggagatggttgggttgacaccgcggtggcggccgtccgccctcggcaccatcctcacgacacccaaatatggcgacgggtgaggaatggtggggagttatttttagagcggtgaggaaggtgggcaggcagcaggtgttggcgctctaaaaataactcccgggagttatttttagagcggaggaatggtggacacccaaatatggcgacggttcctcacccgtcgccatatttgggtgtccgccctcggccggggccgcattcctgggggccgggcggtgctcccgcccgcctcgataaaaggctccggggccggcggcggcccacgagctacccggaggagcgggaggcgccaagctctagaactagtggatcccgcggccgccacc

SEQ ID NO: 178 - DNA, 365 bp, Artificial Sequence
  Description of Artificial Sequence: Synthetic polynucleotide
  SP0351
caccgcggtggcggccgtccgccctcggcaccatcctcacgacacccaaatatggcgacgggtgaggaatggtggggagttatttttagagcggtgaggaaggtgggcaggcagcaggtgttggcgctctaaaaataactcccgggagttatttttagagcgagctctataaatacccgctctggtatttggggttttgaacccgtcgccatatttgggtgtccgccctcggccggggccgcattcctgggggccgggcggtgctcccgcccgcctcgataaaaggctccggggccggcggcggcccacgagctacccggaggagcgggaggcgccaagctctagaactagtggatcccgccacc

SEQ ID NO: 179 - DNA, 365 bp, Artificial Sequence
  Description of Artificial Sequence: Synthetic polynucleotide
  SP0352
caccgcggtggcggccgtccgccctcggcaccatcctcacgacacccaaatatggcgacgggtgaggaatggtggggagctatttttagagcggtgaggaaggtgggcaggcagcaggtgttggcgctctaaaaatagctcccgggagctatttttagagcggaggaatggtggacacccaaatatggcgacggttcctcacccgtcgccatatttgggtgtccgccctcggccggggccgcattcctgggggccgggcggtgctcccgcccgcctcgataaaaggctccggggccggcggcggcccacgagctacccggaggagcgggaggcgccaagctctagaactagtggatcccgccacc

SEQ ID NO: 180 - DNA, 568 bp, Artificial Sequence
  Description of Artificial Sequence: Synthetic polynucleotide
  SP0353
tccctaacctcctgcttgcgaggcctctctctggcctctgagagggtcagtgtcctgccccaacccatgagatgacagactataatagccacaggattaacatagcaggcattgtctttctctgactatagggtgggtattatgtgttcatcaaccatcctaaaaatacccggtaaacaggtgcagcccctgtggctccagtcccctgggatctgttggcttctggctggagatgaagattagggcagaggagaggtgaattagtctcactgagttccaggcatgagactcgggtgtcctttggaacctgggaaatctagattccaggaaacccatctggagggcccggcagacgctccttatacggcccggcctcgctcacctgggccgcggccaggagcgccttctttgggcagcgccgggccggggccgcgccgggcccgacacccaaatatggcgacggccggggccgcattcctgggggccgggcggcgctcccgcccgcctcgataaaaggctccggggccggcggcggcccacgagctacccggaggagcgggaggccacc

SEQ ID NO: 181 - DNA, 376 bp, Artificial Sequence
  Description of Artificial Sequence: Synthetic polynucleotide
  SP0354
ccatcctaaaaatacccggtaaacaggtgcagcccctgtggctccagtcccctgggatctgttggcttctggctggagatgaagattagggcagaggagaggtgaattagtctcactgagttccaggcatgagactcgggtgtcctttggaacccggcagacgctccttatacggcccggcctcgctcacctgggccgcggccaggagcgccttctttgggcagcgccgggccggggccgcgccgggcccgacacccaaatatggcgacggccggggccgcattcctgggggccgggcggcgctcccgcccgcctcgataaaaggctccggggccggcggcggcccacgagctacccggaggagcgggaggccacc

SEQ ID NO: 182 - DNA, 296 bp, Artificial Sequence
  Description of Artificial Sequence: Synthetic polynucleotide
  SP0355
agggtcagtgtcctgccccaacccatgagatgacagactataatagccacaggattaacatagcaggcattgcccggcagacgctccttatacggcccggcctcgctcacctgggccgcggccaggagcgccttctttgggcagcgccgggccggggccgcgccgggcccgacacccaaatatggcgacggccggggccgcattcctgggggccgggcggcgctcccgcccgcctcgataaaaggctccggggccggcggcggcccacgagctacccggaggagcgggaggccacc

SEQ ID NO: 183 - DNA, 654 bp, Artificial Sequence
  Description of Artificial Sequence: Synthetic polynucleotide
  SP0356
ctgaggggtgtcagagcacaggctgaggcctcttgcctgacgtgggaccccttggtctggcatttgtcagtgaggcaggctgggggcaggccccggagcttggcaggaggtgtaaaccggccttggaaggtagggccccacaatggggacagttggatctctgagggagacagggaggcatgatcactgccaaatgcccaccaaggacaaggcacatcccagggagacagacgcagacctggtgccctctggacactggcattcctggaggctgatgatggacagatgggcctggaggtggctcttcgccagctggtgtttcctttggacttcctcagtgtctttggagaagcagagccctaagaataagcagctgcccataaaatctaataccagccaagcatctcaggaattcatggattgtctccatcccggcagacgctccttatacggcccggcctcgctcacctgggccgcggccaggagcgccttctttgggcagcgccgggccggggccgcgccgggcccgacacccaaatatggcgacggccggggccgcattcctgggggccgggcggcgctcccgcccgcctcgataaaaggctccggggccggcggcggcccacgagctacccggaggagcgggaggccacc

SEQ ID NO: 184 - DNA, 659 bp, Artificial Sequence
  Description of Artificial Sequence: Synthetic polynucleotide
  SP0358
ttctgagtcctctaaggtccctcactcccaactcagccccatgtcctgtcaattcccactcagtgtctgatctccttctcctcacctttcccatctcccgtttgacccaagcttcctgagctctcctcccattcccctttttggagtcctcctcctctcccagaacccagtaataagtgggctcctccctggcctggacccccgtggtaaccctataaggcgaggcagctgctgtctgaggcagggaggggctggtgtgggaggctaagggcagctgctaagtttagggtggctccttctctcttcttagagacaacaggtggctggggcctcagtgcccagaaaagaaaatgtcttagaggtatcggcatgggcctggaggaggggggacagggcagggggaggcatcttcctcaggacatcgggtcctagaggcccggcagacgctccttatacggcccggcctcgctcacctgggccgcggccaggagcgccttctttgggcagcgccgggccggggccgcgccgggcccgacacccaaatatggcgacggccggggccgcattcctgggggccgggcggcgctcccgcccgcctcgataaaaggctccggggccggcggcggcccacgagctacccggaggagcgggaggccacc

SEQ ID NO: 185 - DNA, 332 bp, Artificial Sequence
  Description of Artificial Sequence: Synthetic polynucleotide
  SP0359
cctccctggcctggacccccgtggtaaccctataaggcgaggcagctgctgtctgaggcagggaggggctggtgtgggaggctaagggcagctgctaagtttagggtgcccggcagacgctccttatacggcccggcctcgctcacctgggccgcggccaggagcgccttctttgggcagcgccgggccggggccgcgccgggcccgacacccaaatatggcgacggccggggccgcattcctgggggccgggcggcgctcccgcccgcctcgataaaaggctccggggccggcggcggcccacgagctacccggaggagcgggaggccacc

SEQ ID NO: 186 - DNA, 483 bp, Artificial Sequence
  Description of Artificial Sequence: Synthetic polynucleotide
  SP0361
caccgcggtggcggccgtccgccctcggcaccatcctcacgacacccaaatatggcgacgggtgaggaatggtggggagttatttttagagcggtgaggaaggtgggcaggcagcaggtgttggcgctctaaaaataactcccgggagttatttttagagcgagctctataaatacccgctctggtatttggggttttgaacccgtcgccatatttgggtgtccgccctataaatacccgctctggtatttggggttctcctctataaatacccgctctggtatttggggttggcagctgttgcgggatcttgcagctgtcaggggaggggaggcgggggctgatgtcaggagggatacaaatagtgccgacggctgggggccctgtctcccctcgccgcatccactctccggccggccgcctgcccgccgcctcctccgtgcgcccgccagcctcgcccgcgccgtcaccgcggccgccacc

SEQ ID NO: 187 - DNA, 535 bp, Artificial Sequence
  Description of Artificial Sequence: Synthetic polynucleotide
  SP0362
agactggggcaggtgcaggctggattgggtttccagaggctatatatataaaggctgccgggagccccagggccgctccctgagggcacaacactgtgggggcccagccaggcccacattcctttccagaggccagctctccatttatagcccctgggcagagcagcacacccaaatatggcgacgggtgaggaatggtggggagttatttttagagcggtgaggaaggtgggcaggcagcaggtgttggcgctctaaaaataactcccgggagttatttttagagcgagctctataaatacccgctctggtatttggggttttgaacccgtcgccatatttgggtgtccgccctcgggatcttgcagctgtcaggggaggggaggcgggggctgatgtcaggagggatacaaatagtgccgacggctgggggccctgtctcccctcgccgcatccactctccggccggccgcctgcccgccgcctcctccgtgcgcccgccagcctcgcccgcgccgtcaccgcggccgccacc

SEQ ID NO: 188 - DNA, 598 bp, Artificial Sequence
  Description of Artificial Sequence: Synthetic polynucleotide
  SP0363
ctctgtctcctcaggtgcctggctcccagtccccagaacgcctctcctgtaccttgcttcctagctgggcctttccttctcctctataaataccagctctggtatttcgccttggcagctgttgctgctagggagacggctggcttgacatgcatctcctgacaaaacacaaacccgtggtgtgagtgggtgtgggcggtgtgagtagggggatgaatcagagagggggcacacccaaatatggcgacgggtgaggaatggtggggagttatttttagagcggtgaggaaggtgggcaggcagcaggtgttggcgctctaaaaataactcccgggagttatttttagagcgagctctataaatacccgctctggtatttggggttttgaacccgtcgccatatttgggtgtccgccctcgggatcttgcagctgtcaggggaggggaggcgggggctgatgtcaggagggatacaaatagtgccgacggctgggggccctgtctcccctcgccgcatccactctccggccggccgcctgcccgccgcctcctccgtgcgcccgccagcctcgcccgcgccgtcaccgcggccgccacc

SEQ ID NO: 189 - DNA, 683 bp, Artificial Sequence
  Description of Artificial Sequence: Synthetic polynucleotide
  SP0364
ctctgtctcctcaggtgcctggctcccagtccccagaacgcctctcctgtaccttgcttcctagctgggcctttccttctcctctataaataccagctctggtatttcgccttggcagctgttgctgctagggagacggctggcttgacatgcatctcctgacaaaacacaaacccgtggtgtgagtgggtgtgggcggtgtgagtagggggatgaatcagagagggggccaccgcggtggcggccgtccgccctcggcaccatcctcacgacacccaaatatggcgacgggtgaggaatggtggggagttatttttagagcggtgaggaaggtgggcaggcagcaggtgttggcgctctaaaaataactcccgggagttatttttagagcggaggaatggtggacacccaaatatggcgacggttcctcacccgtcgccatatttgggtgtccgccctcccggcagacgctccttatacggcccggcctcgctcacctgggccgcggccaggagcgccttctttgggcagcgccgggccggggccgcgccgggcccgacacccaaatatggcgacggccggggccgcattcctgggggccgggcggcgctcccgcccgcctcgataaaaggctccggggccggcggcggcccacgagctacccggaggagcgggaggccacc

SEQ ID NO: 190 - DNA, 453 bp, Artificial Sequence
  Description of Artificial Sequence: Synthetic polynucleotide
  SP0365
caccgcggtggcggccgtccgccctcggcaccatcctcacgacacccaaatatggcgacgggtgaggaatggtggggagttatttttagagcggtgaggaaggtgggcaggcagcaggtgttggcgctctaaaaataactcccgggagttatttttagagcggaggaatggtggacacccaaatatggcgacggttcctcacccgtcgccatatttgggtgtccgccctcccggcagacgctccttatacggcccggcctcgctcacctgggccgcggccaggagcgccttctttgggcagcgccgggccggggccgcgccgggcccgacacccaaatatggcgacggccggggccgcattcctgggggccgggcggcgctcccgcccgcctcgataaaaggctccggggccggcggcggcccacgagctacccggaggagcgggaggccacc

SEQ ID NO: 191 - DNA, 591 bp, Artificial Sequence
  Description of Artificial Sequence: Synthetic polynucleotide
  SP0366
cctccctggcctggacccccgtggtaaccctataaggcgaggcagctgctgtctgaggcagggaggggctggtgtgggaggctaagggcagctgctaagtttagggtgcaccgcggtggcggccgtccgccctcggcaccatcctcacgacacccaaatatggcgacgggtgaggaatggtggggagttatttttagagcggtgaggaaggtgggcaggcagcaggtgttggcgctctaaaaataactcccgggagttatttttagagcggaggaatggtggacacccaaatatggcgacggttcctcacccgtcgccatatttgggtgtccgccctataaatacccgctctggtatttggggttctcctctataaatacccgctctggtatttggggttggcagctgttgcgggatcttgcagctgtcaggggaggggaggcgggggctgatgtcaggagggatacaaatagtgccgacggctgggggccctgtctcccctcgccgcatccactctccggccggccgcctgcccgccgcctcctccgtgcgcccgccagcctcgcccgcgccgtcaccgcggccgccacc

SEQ ID NO: 192 - DNA, 429 bp, Artificial Sequence
  Description of Artificial Sequence: Synthetic polynucleotide
  SP0367
cctccctggcctggacccccgtggtaaccctataaggcgaggcagctgctgtctgaggcagggaggggctggtgtgggaggctaagggcagctgctaagtttagggtgccatgttcccggcgaagggccagctgtcccccgccagctagactcagcacttagtttaggaaccagtgagcaagtcagcccttggggcagcccatacaaggccatggggctgggcaagctgcacgcctgggtccggggtgggcacggtgcccgggcaacgagctgaaagctcatctactctcaggggcccctccctggggacagcccctcctggctagtcacaccctgtaggctcctctatataacccaggggcacaggggctgcccccgggtcaccaccacctccacagcacagacagacactcaggagccagcgccacc

SEQ ID NO: 193 - DNA, 550 bp, Artificial Sequence
  Description of Artificial Sequence: Synthetic polynucleotide
  SP0368
cctccctggcctggacccccgtggtaaccctataaggcgaggcagctgctgtctgaggcagggaggggctggtgtgggaggctaagggcagctgctaagtttagggtggccactacgggtctaggctgcccatgtaaggaggcaaggcctggggacacccgagatgcctggttataattaacccagacatgtggctgccccccccccccaacacctgctgcctgagcctcacccccaccccggtgcctgggtcttaggctctgtacaccatggaggagaagctcgctctaaaaataaccctgataaatacccgctctggtatttggggttctcctctataaatacccgctctggtatttggggttggcagctgttgcgggatcttgcagctgtcaggggaggggaggcgggggctgatgtcaggagggatacaaatagtgccgacggctgggggccctgtctcccctcgccgcatccactctccggccggccgcctgcccgccgcctcctccgtgcgcccgccagcctcgcccgcgccgtcaccgccacc

SEQ ID NO: 194 - DNA, 388 bp, Artificial Sequence
  Description of Artificial Sequence: Synthetic polynucleotide
  SP0369
cgacacccaaatatggcgacgggtgaggaatggtggggagttatttttagagcggtgaggaaggtgggcaggcagcaggtgttggcgctctaaaaataactcccgggagttatttttagagcggagcgacacccaaatatggcgacgggtgaggaatggtggggagttatttttagagcggtgaggaaggtgggcaggcagcaggtgttggcgctctaaaaataactcccgggagttatttttagagcggagcggccggggccgcattcctgggggccgggcggtgctcccgcccgcctcgataaaaggctccggggccggcggcggcccacgagctacccggaggagcgggaggcgccaagctctagaactagtggatcccgccacc

SEQ ID NO: 195 - DNA, 514 bp, Artificial Sequence
  Description of Artificial Sequence: Synthetic polynucleotide
  SP0370
cgacacccaaatatggcgacgggtgaggaatggtggggagttatttttagagcggtgaggaaggtgggcaggcagcaggtgttggcgctctaaaaataactcccgggagttatttttagagcggagcgacacccaaatatggcgacgggtgaggaatggtggggagttatttttagagcggtgaggaaggtgggcaggcagcaggtgttggcgctctaaaaataactcccgggagttatttttagagcggagcgacacccaaatatggcgacgggtgaggaatggtggggagttatttttagagcggtgaggaaggtgggcaggcagcaggtgttggcgctctaaaaataactcccgggagttatttttagagcggagcggccggggccgcattcctgggggccgggcggtgctcccgcccgcctcgataaaaggctccggggccggcggcggcccacgagctacccggaggagcgggaggcgccaagctctagaactagtggatcccgccacc

SEQ ID NO: 196 - DNA, 354 bp, Artificial Sequence
  Description of Artificial Sequence: Synthetic polynucleotide
  SP0371
taaggcgaggcagctgctgtctgaggcaggacacccaaatatggcgacgggtgaggaatggtggggagttatttttagagcggtgaggaaggtgggcaggcagcaggtgttggcgctctaaaaataactcccgggagttatttttagagcggaggaatggtggacacccaaatatggcgacggttcctcacccgtcgccatatttgggtgtccgccctcggccggggccgcattcctgggggccgggcggtgctcccgcccgcctcgataaaaggctccggggccggcggcggcccacgagctacccggaggagcgggaggcgccaagctctagaactagtggatcccgccacc

SEQ ID NO: 197 - DNA, 354 bp, Artificial Sequence
  Description of Artificial Sequence: Synthetic polynucleotide
  SP0372
aggctaagggcagctgctaagtttagggtgacacccaaatatggcgacgggtgaggaatggtggggagttatttttagagcggtgaggaaggtgggcaggcagcaggtgttggcgctctaaaaataactcccgggagttatttttagagcggaggaatggtggacacccaaatatggcgacggttcctcacccgtcgccatatttgggtgtccgccctcggccggggccgcattcctgggggccgggcggtgctcccgcccgcctcgataaaaggctccggggccggcggcggcccacgagctacccggaggagcgggaggcgccaagctctagaactagtggatcccgccacc

SEQ ID NO: 198 - DNA, 362 bp, Artificial Sequence
  Description of Artificial Sequence: Synthetic polynucleotide
  SP0373
taaggcgaggcagctgctgtctgaggcaggacacccaaatatggcgacgggtgaggaatggtggggagttatttttagagcggtgaggaaggtgggcaggcagcaggtgttggcgctctaaaaataactcccgggagttatttttagagcgctctaaggtccctcactcccaactcagccccatgtcctgtcaattcacccgtcgccatatttgggtgtccgccctcggccggggccgcattcctgggggccgggcggtgctcccgcccgcctcgataaaaggctccggggccggcggcggcccacgagctacccggaggagcgggaggcgccaagctctagaactagtggatcccgccacc

SEQ ID NO: 199 - DNA, 362 bp, Artificial Sequence
  Description of Artificial Sequence: Synthetic polynucleotide
  SP0374
ctctaaggtccctcactcccaactcagccccatgtcctgtcaattcgacacccaaatatggcgacgggtgaggaatggtggggagttatttttagagcggtgaggaaggtgggcaggcagcaggtgttggcgctctaaaaataactcccgggagttatttttagagcgtaaggcgaggcagctgctgtctgaggcagacccgtcgccatatttgggtgtccgccctcggccggggccgcattcctgggggccgggcggtgctcccgcccgcctcgataaaaggctccggggccggcggcggcccacgagctacccggaggagcgggaggcgccaagctctagaactagtggatcccgccacc

SEQ ID NO: 200 - DNA, 376 bp, Artificial Sequence
  Description of Artificial Sequence: Synthetic polynucleotide
  SP0375
taaggcgaggcagctgctgtctgaggcagaggctaagggcagctgctaagtttagggtctctaaggtccctcactcccaactcagccccatgtcctgtcaattccgacacccaaatatggcgacgggtgaggaatggtggggagttatttttagagcaggcagcaggtgttggcgctctaaaaataactcccgggagttatttttagagcgacccgtcgccatatttgggtgtccgccctcggccggggccgcattcctgggggccgggcggtgctcccgcccgcctcgataaaaggctccggggccggcggcggcccacgagctacccggaggagcgggaggcgccaagctctagaactagtggatcccgccacc

SEQ ID NO: 201 - DNA, 274 bp, Artificial Sequence
  Description of Artificial Sequence: Synthetic polynucleotide
  CRE0016
ccttgcctgactattggcaggcggacctggtggtcagacctcagtgatcctcagggaccagtgaatatttcaggctggggctgagcatcacctgctcccttggccccacttatagggcaaaggggagtctaccagcctactcactgatgacaaactggaaaagtttgtcctgtctctgctctggccccacctcgccctctcccctacttggaagttcctttcctgaaccactgactgccaaagcttgagggattaaataaatcatctggcccaa

SEQ ID NO: 202 - DNA, 200 bp, Artificial Sequence
  Description of Artificial Sequence: Synthetic polynucleotide
  CRE0018
ctgtgtgtttctgtggctgagtcagatggaggagtcctcatgtttcactgcttagcagtttttgtccttcctagtacccgttcccagcccacaagatgcagaaagagctgttgctagcgtgagttatttttgtcagctgagtcaccacgccagaaagcaagaaatgacccgctttatgtctgctctgaggagctggaacc

SEQ ID NO: 203 - DNA, 284 bp, Artificial Sequence
  Description of Artificial Sequence: Synthetic polynucleotide
  CRE0020
gggccccacagcagctgggggcatttatgggccttcctataaacttctgagagggtaactttatcctgcttctttcagccaagtatcctcctccagcagctggtcacaaagctggttaatctcccagagtgctcagcttaaaacccgtgactcacagcacagccagtgtgggggagggggtggctgcctccaatacgtggcgcccagagtcagctgttctggggccttctctggtttctccaactgagtcctgaggtttggggccttgtcttccttcctggagt

SEQ ID NO: 204 - DNA, 160 bp, Artificial Sequence
  Description of Artificial Sequence: Synthetic polynucleotide
  CRE0025
gcgccctgatgaatatgcatcgcggcgcgcccgcccccggctcctcctttcggtttccttcccgccgccaggcggaagcgaagagccgcgcttcccgcgcgcccaggccggccgtggtagggtggggcggggcgggccgcgagccggagaaagagaaagc

SEQ ID NO: 205 - DNA, 230 bp, Artificial Sequence
  Description of Artificial Sequence: Synthetic polynucleotide
  CRE0027
tacatcatttacctagaaaagaggacagctgtcctttcccaaagctccggtgaccctgccccgcccagtgtgactagcccaggttggtgattctgatctgttgccaaaccaaactggctccccggggagccatttggtaatgttccctggagtcatttccttgcgaagcattccttttcggtgagaggacatttttttcatccctgataaacaaccacagcctgcgccag

SEQ ID NO: 206 - DNA, 230 bp, Artificial Sequence
  Description of Artificial Sequence: Synthetic polynucleotide
  CRE0029
ctctgtctcctcaggtgcctggctcccagtccccagaacgcctctcctgtaccttgcttcctagctgggcctttccttctcctctataaataccagctctggtatttcgccttggcagctgttgctgctagggagacggctggcttgacatgcatctcctgacaaaacacaaacccgtggtgtgagtgggtgtgggcggtgtgagtagggggatgaatcagagagggggc

SEQ ID NO: 207 - DNA, 216 bp, Artificial Sequence
  Description of Artificial Sequence: Synthetic polynucleotide
  CRE0031
taagtccgggcagggtcctgtccataaaaggcttttcccgggccggctccccgccggcagcgtgccccgccccggcccgctccatctccaaagcatgcagagaatgtctcggcagccccggtagactgctccaacttggtgtctttccccaaatatggagcctgtgtggagtcactgggggagccgggggtggggagcggagccggcttcctctag

SEQ ID NO: 208 - DNA, 194 bp, Artificial Sequence
  Description of Artificial Sequence: Synthetic polynucleotide
  CRE0035
gccactacgggtctaggctgcccatgtaaggaggcaaggcctggggacacccgagatgcctggttataattaacccagacatgtggctgccccccccccccaacacctgctgcctgagcctcacccccaccccggtgcctgggtcttaggctctgtacaccatggaggagaagctcgctctaaaaataaccctg

SEQ ID NO: 209 - DNA, 245 bp, Artificial Sequence
  Description of Artificial Sequence: Synthetic polynucleotide
  CRE0036
ctgagattttcctagcattttgtgtttcatgactaaatatggtttgtgtttcaagaccaatgagctgggaactgtactgttctttcccctcccatcaactcatttttggcacaagacgcactctagtcagttggagcaaatcccctgacccgggtgcagttccaaaagcagacactcgagcgtgttttacctaattaggaaatgctttgctccaaaccgaactgctcattcaggttagagaggag

SEQ ID NO: 210 - DNA, 231 bp, Artificial Sequence
  Description of Artificial Sequence: Synthetic polynucleotide
  CRE0047
cccacccatgcctcctcaggtaccccctgccccccacagctcctctcctgtgccttgtttcccagccatgcgttctcctctataaatacccgctctggtatttggggttggcagctgttgctgccagggagatggttgggttgacatgcggctcctgacaaaacacaaacccctggtgtgtgtgggcgtgggtggtgtgagtagggggatgaatcagggagggggcggggg

SEQ ID NO: 211 - DNA, 128 bp, Artificial Sequence
  Description of Artificial Sequence: Synthetic polynucleotide
  CRE0050
ctagactagcatgctgcccatgtaaggaggcaaggcctggggacacccgagatgcctggttataattaacccagacatgtggctgcccccccccccccaacacctgctgcctctaaaaataaccctgc

SEQ ID NO: 212 - DNA, 240 bp, Artificial Sequence
  Description of Artificial Sequence: Synthetic polynucleotide
  CRE0051
caccgcggtggcggccgtccgccctcggcaccatcctcacgacacccaaatatggcgacgggtgaggaatggtggggagttatttttagagcggtgaggaaggtgggcaggcagcaggtgttggcgctctaaaaataactcccgggagttatttttagagcggaggaatggtggacacccaaatatggcgacggttcctcacccgtcgccatatttgggtgtccgccctcggccggggcc

SEQ ID NO: 213 - DNA, 125 bp, Artificial Sequence
  Description of Artificial Sequence: Synthetic polynucleotide
  CRE0059
cccctgccccccacagctcctctcctgtgccttgtttcccagccatgcgttctcctctataaatacccgctctggtatttggggttggcagctgttgctgccagggagatggttgggttgacatg

SEQ ID NO: 214 - DNA, 32 bp, Artificial Sequence
  Description of Artificial Sequence: Synthetic oligonucleotide
  CRE0060
ctctataaatacccgctctggtatttggggtt

SEQ ID NO: 215 - DNA, 167 bp, Artificial Sequence
  Description of Artificial Sequence: Synthetic polynucleotide
  CRE0069
agactggggcaggtgcaggctggattgggtttccagaggctatatatataaaggctgccgggagccccagggccgctccctgagggcacaacactgtgggggcccagccaggcccacattcctttccagaggccagctctccatttatagcccctgggcagagcagc

SEQ ID NO: 216 - DNA, 229 bp, Artificial Sequence
  Description of Artificial Sequence: Synthetic polynucleotide
  CRE0071
caccgcggtggcggccgtccgccctcggcaccatcctcacgacacccaaatatggcgacgggtgaggaatggtggggagttatttttagagcggtgaggaaggtgggcaggcagcaggtgttggcgctctaaaaataactcccgggagttatttttagagcggaggaatggtggacacccaaatatggcgacggttcctcacccgtcgccatatttgggtgtccgccct

SEQ ID NO: 217 - DNA, 188 bp, Artificial Sequence
  Description of Artificial Sequence: Synthetic polynucleotide
  CRE0071.5
acacccaaatatggcgacgggtgaggaatggtggggagttatttttagagcggtgaggaaggtgggcaggcagcaggtgttggcgctctaaaaataactcccgggagttatttttagagcgagctctataaatacccgctctggtatttggggttttgaacccgtcgccatatttgggtgtccgccct

SEQ ID NO: 218 - DNA, 344 bp, Artificial Sequence
  Description of Artificial Sequence: Synthetic polynucleotide
  CRE0073
tccctaacctcctgcttgcgaggcctctctctggcctctgagagggtcagtgtcctgccccaacccatgagatgacagactataatagccacaggattaacatagcaggcattgtctttctctgactatagggtgggtattatgtgttcatcaaccatcctaaaaatacccggtaaacaggtgcagcccctgtggctccagtcccctgggatctgttggcttctggctggagatgaagattagggcagaggagaggtgaattagtctcactgagttccaggcatgagactcgggtgtcctttggaacctgggaaatctagattccaggaaacccatctggaggg

SEQ ID NO: 219 - DNA, 152 bp, Artificial Sequence
  Description of Artificial Sequence: Synthetic polynucleotide
  CRE0074
ccatcctaaaaatacccggtaaacaggtgcagcccctgtggctccagtcccctgggatctgttggcttctggctggagatgaagattagggcagaggagaggtgaattagtctcactgagttccaggcatgagactcgggtgtcctttggaa

SEQ ID NO: 220 - DNA, 72 bp, Artificial Sequence
  Description of Artificial Sequence: Synthetic oligonucleotide
  CRE0075
agggtcagtgtcctgccccaacccatgagatgacagactataatagccacaggattaacatagcaggcattg

SEQ ID NO: 221 - DNA, 430 bp, Artificial Sequence
  Description of Artificial Sequence: Synthetic polynucleotide
  CRE0076
ctgaggggtgtcagagcacaggctgaggcctcttgcctgacgtgggaccccttggtctggcatttgtcagtgaggcaggctgggggcaggccccggagcttggcaggaggtgtaaaccggccttggaaggtagggccccacaatggggacagttggatctctgagggagacagggaggcatgatcactgccaaatgcccaccaaggacaaggcacatcccagggagacagacgcagacctggtgccctctggacactggcattcctggaggctgatgatggacagatgggcctggaggtggctcttcgccagctggtgtttcctttggacttcctcagtgtctttggagaagcagagccctaagaataagcagctgcccataaaatctaataccagccaagcatctcaggaattcatggattgtctccat

SEQ ID NO: 222 - DNA, 435 bp, Artificial Sequence
  Description of Artificial Sequence: Synthetic polynucleotide
  CRE0078
ttctgagtcctctaaggtccctcactcccaactcagccccatgtcctgtcaattcccactcagtgtctgatctccttctcctcacctttcccatctcccgtttgacccaagcttcctgagctctcctcccattcccctttttggagtcctcctcctctcccagaacccagtaataagtgggctcctccctggcctggacccccgtggtaaccctataaggcgaggcagctgctgtctgaggcagggaggggctggtgtgggaggctaagggcagctgctaagtttagggtggctccttctctcttcttagagacaacaggtggctggggcctcagtgcccagaaaagaaaatgtcttagaggtatcggcatgggcctggaggaggggggacagggcagggggaggcatcttcctcaggacatcgggtcctagagg

SEQ ID NO: 223 - DNA, 108 bp, Artificial Sequence
  Description of Artificial Sequence: Synthetic polynucleotide
  CRE0079
cctccctggcctggacccccgtggtaaccctataaggcgaggcagctgctgtctgaggcagggaggggctggtgtgggaggctaagggcagctgctaagtttagggtg

SEQ ID NO: 224 - DNA, 48 bp, Artificial Sequence
  Description of Artificial Sequence: Synthetic oligonucleotide
  48 BP
ttctcctctataaatacccgctctggtatttggggttggcagctgttg

SEQ ID NO: 225 - DNA, 378 bp, Artificial Sequence
  Description of Artificial Sequence: Synthetic polynucleotide
  CRE0071.7
cgacacccaaatatggcgacgggtgaggaatggtggggagttatttttagagcggtgaggaaggtgggcaggcagcaggtgttggcgctctaaaaataactcccgggagttatttttagagcggagcgacacccaaatatggcgacgggtgaggaatggtggggagttatttttagagcggtgaggaaggtgggcaggcagcaggtgttggcgctctaaaaataactcccgggagttatttttagagcggagcgacacccaaatatggcgacgggtgaggaatggtggggagttatttttagagcggtgaggaaggtgggcaggcagcaggtgttggcgctctaaaaataactcccgggagttatttttagagcggag

SEQ ID NO: 226 - DNA, 226 bp, Artificial Sequence
  Description of Artificial Sequence: Synthetic polynucleotide
  CRE0071.10
taaggcgaggcagctgctgtctgaggcaggacacccaaatatggcgacgggtgaggaatggtggggagttatttttagagcggtgaggaaggtgggcaggcagcaggtgttggcgctctaaaaataactcccgggagttatttttagagcgctctaaggtccctcactcccaactcagccccatgtcctgtcaattcacccgtcgccatatttgggtgtccgccct

SEQ ID NO: 227 - DNA, 226 bp, Artificial Sequence
  Description of Artificial Sequence: Synthetic polynucleotide
  CRE0071.11
ctctaaggtccctcactcccaactcagccccatgtcctgtcaattcgacacccaaatatggcgacgggtgaggaatggtggggagttatttttagagcggtgaggaaggtgggcaggcagcaggtgttggcgctctaaaaataactcccgggagttatttttagagcgtaaggcgaggcagctgctgtctgaggcagacccgtcgccatatttgggtgtccgccct

SEQ ID NO: 228 - DNA, 240 bp, Artificial Sequence
  Description of Artificial Sequence: Synthetic polynucleotide
  CRE0071.12
taaggcgaggcagctgctgtctgaggcagaggctaagggcagctgctaagtttagggtctctaaggtccctcactcccaactcagccccatgtcctgtcaattccgacacccaaatatggcgacgggtgaggaatggtggggagttatttttagagcaggcagcaggtgttggcgctctaaaaataactcccgggagttatttttagagcgacccgtcgccatatttgggtgtccgccct

SEQ ID NO: 229 - DNA, 46 bp, Artificial Sequence
  Description of Artificial Sequence: Synthetic oligonucleotide
  DES_MT_ENHANCER_48BP_V2
tactaaaaatagaacgactatttttaggcttttctggcagctggcc

SEQ ID NO: 230 - DNA, 48 bp, Artificial Sequence
  Description of Artificial Sequence: Synthetic oligonucleotide
  DES_MT_ENHANCER_48BP_V3
cgaggtactataaatacccttagaggtattttatcttggcagctaggt

SEQ ID NO: 231 - DNA, 70 bp, Artificial Sequence
  Description of Artificial Sequence: Synthetic oligonucleotide
  DES_MT_ENHANCER_72 BP_V2
tactaaaaatagaacgactatttttaggcttttctggcagctggccctgccagacagagttcctcagtaa

SEQ ID NO: 232 - DNA, 72 bp, Artificial Sequence
  Description of Artificial Sequence: Synthetic oligonucleotide
  DES_MT_ENHANCER_72 BP_V3
cgaggtactataaatacccttagaggtattttatcttggcagctaggtctgccagacagagttcctcagtaa

SEQ ID NO: 233 - DNA, 70 bp, Artificial Sequence
  Description of Artificial Sequence: Synthetic oligonucleotide
  DES_MT_ENHANCER_72 BP_V4
tactaaaaatagaacgactatttttaggcttttctggcagctggccctgccagacagataaacgagctat

SEQ ID NO: 234 - DNA, 72 bp, Artificial Sequence
  Description of Artificial Sequence: Synthetic oligonucleotide
  DES_MT_ENHANCER_72 BP_V5
cgaggtactataaatacccttagaggtattttatcttggcagctaggtctgccagacagataaacgagctat

SEQ ID NO: 235 - DNA, 73 bp, Artificial Sequence
  Description of Artificial Sequence: Synthetic oligonucleotide
  DES_MT_ENHANCER_72 BP_V6
ttaaacgagctattagttatgaggtccgtagattgaataaacgagctattagttatgaggtccgtagattgaa

SEQ ID NO: 236 - DNA, 229 bp, Artificial Sequence
  Description of Artificial Sequence: Synthetic polynucleotide
  CRE0071.4
caccgcggtggcggccgtccgccctcggcaccatcctcacgacacccaaatatggcgacgggtgaggaatggtggggagttatttttagagcggtgaggaaggtgggcaggcagcaggtgttggcgctctaaaaataactcccgggagttatttttagagcgaggtaaacgagctattagttatgaggtccgtagattgaacccgtcgccatatttgggtgtccgccct

SEQ ID NO: 237 - DNA, 252 bp, Artificial Sequence
  Description of Artificial Sequence: Synthetic polynucleotide
  CRE0071.6
cgacacccaaatatggcgacgggtgaggaatggtggggagttatttttagagcggtgaggaaggtgggcaggcagcaggtgttggcgctctaaaaataactcccgggagttatttttagagcggagcgacacccaaatatggcgacgggtgaggaatggtggggagttatttttagagcggtgaggaaggtgggcaggcagcaggtgttggcgctctaaaaataactcccgggagttatttttagagcggag

SEQ ID NO: 238 - DNA, 218 bp, Artificial Sequence
  Description of Artificial Sequence: Synthetic polynucleotide
  CRE0071.8
taaggcgaggcagctgctgtctgaggcaggacacccaaatatggcgacgggtgaggaatggtggggagttatttttagagcggtgaggaaggtgggcaggcagcaggtgttggcgctctaaaaataactcccgggagttatttttagagcggaggaatggtggacacccaaatatggcgacggttcctcacccgtcgccatatttgggtgtccgccct

SEQ ID NO: 239 - DNA, 218 bp, Artificial Sequence
  Description of Artificial Sequence: Synthetic polynucleotide
  CRE0071.9
aggctaagggcagctgctaagtttagggtgacacccaaatatggcgacgggtgaggaatggtggggagttatttttagagcggtgaggaaggtgggcaggcagcaggtgttggcgctctaaaaataactcccgggagttatttttagagcggaggaatggtggacacccaaatatggcgacggttcctcacccgtcgccatatttgggtgtccgccct

SEQ ID NO: 240 - DNA, 111 bp, Artificial Sequence
  Description of Artificial Sequence: Synthetic polynucleotide
  CRE077
tctgagggagacagggaggcatgatcactgccaaatgcccaccaaggacaaggcacatcccagggagacagacgcagacctggtgccctctggacactggcattcctggag

SEQ ID NO: 241 - DNA, 199 bp, Artificial Sequence
  Description of Artificial Sequence: Synthetic polynucleotide
  CRE0029.2
ctctgtctcctcaggtgcctggctgcttcctagctgggcctttccttctcctctataaataccagctctggtatttcgccttggcagctgttgctgctagggagacggctggcttgacatgcatctcctgacaaaacacaaacccgtggtgtgagtgggtgtgggcggtgtgagtagggggatgaatcagagagggggc

SEQ ID NO: 242 - DNA, 119 bp, Artificial Sequence
  Description of Artificial Sequence: Synthetic polynucleotide
  CRE0069.2
agactggggcaggtgcaggctggattgggtttccagaggctatatatataaaggctgccgggagcccacattcctttccagaggccagctctccatttatagcccctgggcagagcagc

SEQ ID NO: 243 - DNA, 188 bp, Artificial Sequence
  Description of Artificial Sequence: Synthetic polynucleotide
  CRE0071.13
acacccaaatatggcgacgggtgaggaatggtggggagttatttttagagcggtgaggaaggtgggcaggcagcaggtgttggcgctctaaaaataactcccgggagttatttttagagcggaggaatggtggacacccaaatatggcgacggttcctcacccgtcgccatatttgggtgtccgccct

SEQ ID NO: 244 - DNA, 229 bp, Artificial Sequence
  Description of Artificial Sequence: Synthetic polynucleotide
  CRE0071.14
caccgcggtggcggccgtccgccctcggcaccatcctcacgacacccaaatatggcgacgggtgaggaatggtggggagttatttttagagcggtgaggaaggtgggcaggcagcaggtgttggcgctctaaaaataactcccgggagttatttttagagcgagctctataaatacccgctctggtatttggggttttgaacccgtcgccatatttgggtgtccgccct

SEQ ID NO: 245 - DNA, 229 bp, Artificial Sequence
  Description of Artificial Sequence: Synthetic polynucleotide
  CRE0071.5
caccgcggtggcggccgtccgccctcggcaccatcctcacgacacccaaatatggcgacgggtgaggaatggtggggagctatttttagagcggtgaggaaggtgggcaggcagcaggtgttggcgctctaaaaatagctcccgggagctatttttagagcggaggaatggtggacacccaaatatggcgacggttcctcacccgtcgccatatttgggtgtccgccct

SEQ ID NO: 246 - DNA, 72 bp, Artificial Sequence
  Description of Artificial Sequence: Synthetic oligonucleotide
  72 BP
ttctcctctataaatacccgctctggtatttggggttggcagctgttgctgccagggagatggttgggttga

SEQ ID NO: 247 - DNA, 90 bp, Artificial Sequence
  Description of Artificial Sequence: Synthetic oligonucleotide
  CRE0093
ccacagcagctgggggcatttatgggccttcctataaacttctgagagggtaactttatcctgcttctttcagccaagtatcctcctcca

SEQ ID NO: 248 - DNA, 121 bp, Artificial Sequence
  Description of Artificial Sequence: Synthetic polynucleotide
  CRE0094
aaacccgtgactcacagcacagccagtgtgggggagggggtggctgcctccaatacgtggcgcccagagtcagctgttctggggccttctctggtttctccaactgagtcctgaggtttgg

SEQ ID NO: 249 - DNA, 229 bp, Artificial Sequence
  Description of Artificial Sequence: Synthetic polynucleotide
  CRE0071.16
caccgcggtggcggccgtccgccctcggatagctcgtttagacacccaaatatggcgacggtaaacgagctattgggagttatttttagagcgtaaacgagctattagttgcagcaggtgttggcgctctaaaaataactcccgggagttatttttagagcggaggaatggtggacacccaaatatggcgacggttcctcacccgtcgccatatttgggtgtccgccct

SEQ ID NO: 250 - DNA, 229 bp, Artificial Sequence
  Description of Artificial Sequence: Synthetic polynucleotide
  CRE0071.17
caccgcggtggcggccgtccgccctcggatagctcgtttagacacccaaatatggcgacgggtgaggaatggtggggagttatttttagagcggtgaggaaggtgggcaggcagcaggtgttggcgctctaaaaataactcccgggagttatttttagagcggaggaatggtggacacccaaatatggcgacggttcctcacccgtcgccatatttgggtgtccgccct

SEQ ID NO: 251 - DNA, 229 bp, Artificial Sequence
  Description of Artificial Sequence: Synthetic polynucleotide
  CRE0071.18
caccgcggtggcggccgtccgccctcggcaccatcctcacgacacccaaatatggcgacggtaaacgagctattgggagttatttttagagcggtgaggaaggtgggcaggcagcaggtgttggcgctctaaaaataactcccgggagttatttttagagcggaggaatggtggacacccaaatatggcgacggttcctcacccgtcgccatatttgggtgtccgccct

SEQ ID NO: 252 - DNA, 149 bp, Artificial Sequence
  Description of Artificial Sequence: Synthetic polynucleotide
  CRE0071.19
acacccaaatatggcgacgggtgaggaatggtggggagttatttttagagcggtgaggaaggtgggcaggcagcaggtgttggcgctctaaaaataactcccgggagttatttttagagcgcccgtcgccatatttgggtgtccgccct

SEQ ID NO: 253 - DNA, 217 bp, Artificial Sequence
  Description of Artificial Sequence: Synthetic polynucleotide
  CRE0071.20
ggccgtccgccctcggcaccatcctcacgacacccaaatatggcgacgggtgaggaatggtggggagctatttttagagcgtaaacgagctattagttgcagcaggtgttggcgctctaaaaatagctcccgggagctatttttagagcggaggaatggtggacacccaaatatggcgacggttcctcacccgtcgccatatttgggtgtccgccct

SEQ ID NO: 254 - DNA, 217 bp, Artificial Sequence
  Description of Artificial Sequence: Synthetic polynucleotide
  CRE0071.21
ggccgtccgccctcggcaccatcctcacgacacccaaatatggcgacgggtgaggaatggtggggagctatttttagagcgtaaacgagctattagttgcagcaggtgttggcgctctaaaaatagctcccgggagctatttttagagcgagctctataaatacccgctctggtatttggggttttgaacccgtcgccatatttgggtgtccgccct

SEQ ID NO: 255 - DNA, 180 bp, Artificial Sequence
  Description of Artificial Sequence: Synthetic polynucleotide
  CRE0071.22
ggccgtccgccctcgggacacccaaatatggcgacgggggagttatttttagagcgggcaggcagcaggtgttggcgctctaaaaataactcccgggagttatttttagagcggaggaatggtggacacccaaatatggcgacggttcctcacccgtcgccatatttgggtgtccgccct

SEQ ID NO: 256 - DNA, 162 bp, Artificial Sequence
  Description of Artificial Sequence: Synthetic polynucleotide
  CRE0071.23
caccgcggtggcggccgtccgccctcggcaccatcctcacgacacccaaatatggcgacgggtgaggaatggtggggagttatttttagagcggtgaggaaggtgggcaggcagcaggtgttggcgctctaaaaataactcccgggagttatttttagagcg

SEQ ID NO: 257 - DNA, 67 bp, Artificial Sequence
  Description of Artificial Sequence: Synthetic oligonucleotide
  CNTRL_001 (67 BP)
aggcagtgtatactcttccataaacgagctattagttatgaggtccgtagattgaaaagggtgacgg

SEQ ID NO: 258 - DNA, 229 bp, Artificial Sequence
  Description of Artificial Sequence: Synthetic polynucleotide
  CRE0071.24
caccgcggtggcggccgtccgccctcggcaccatcctcacgacacccaaatatggcgacgggtgaggaatggtggggataaacgagctatgcggtgaggaaggtgggcaggcagcaggtgttggcgcatagctcgtttatcccgggataaacgagctatgcggaggaatggtggacacccaaatatggcgacggttcctcacccgtcgccatatttgggtgtccgccct

SEQ ID NO: 259 - DNA, 45 bp, Artificial Sequence
  Description of Artificial Sequence: Synthetic oligonucleotide
  CNTRL_001
aggcagtgtatactcttccataaacgagctattagttatgaggtc

SEQ ID NO: 260 - DNA, 60 bp, Artificial Sequence
  Description of Artificial Sequence: Synthetic oligonucleotide
  CRE0093.2
ccacagcagctgggggcatttctgagagggtaactttatcctgcttctttcagccaagta

SEQ ID NO: 261 - DNA, 106 bp, Artificial Sequence
  Description of Artificial Sequence: Synthetic polynucleotide
  CRE0094.2
ctcacagcacagccagtgtgggggagggggtggctgcctccgtggcgcccagagtcagctgttctggggccttctctggtttctccaactgagtcctgaggtttgg

SEQ ID NO: 262 - DNA, 245 bp, Artificial Sequence
  Description of Artificial Sequence: Synthetic polynucleotide
  CRE0005
actcgggggccaggcactggcgctgacgcaggctagcagggcgccactggctggtccccacccacctcggtgggttgggggatgggcgcaccagcccctcctgggtgagccctagcctggggcttcctatttcgggagccgggggcgtgggccacgtctcctcatgtgatgcgagggctatttaaagcggcagcccgggcagggagccgccgtcggagcccttgcacgcctgctctcttgtagct

SEQ ID NO: 263 - DNA, 205 bp, Artificial Sequence
  Description of Artificial Sequence: Synthetic polynucleotide
  CRE0009
ctgagtccttttgcatacatttttcaaatgataactcactctacccaccccccttccctacccccaaggcgatttattgaaaaaaccaccttatatggtaatattgctaacacaccgtcagctggcctttttagggactttgtttaaagaagatccgcctctggggttttatattgctctggtattcatgccaaagacacaccag

SEQ ID NO: 264 - DNA, 292 bp, Artificial Sequence
  Description of Artificial Sequence: Synthetic polynucleotide
  CRE0010_ITGB1BP2
gtttcttagcagctgctgctgtgtccaaggcttggaattgctgtggtgaatctaaaactgtctcagtagtggtgagctgacctcacccaagttcaaagccctactctgcctgatccttttttcctgagcctcagagctaaaatgcccccgagctctttcctattggctggaaagacgaattgaagttcccttgcccatgttaggaggtgtacgcctcctgaactaaagatagaaacagctggcccttccaggcagctaaaagcctccagactaagaggtgttccccattcgg

SEQ ID NO: 265 - DNA, 524 bp, Artificial Sequence
  Description of Artificial Sequence: Synthetic polynucleotide
  CRE0010_ALDOA
gccgcgaagaccggaagctggggcggccccgggccgcgcgcgctgggcctgggaggcgaaactcagcttccttcgtttccgacttttccatccgcgtcctccacttccccgttccgccctcccccattgccaacattctggctgagtcacggcgccccagagcgcgccaggctgggggaaaggagcagaagggagggccctagcgacccgcgggatgtggtccgagtcacgtccgaggggggtggggagggatcgtgttctcggcgcccgccccttcctagcgcggcctctgggctgcgcctctcgggggcggcccgtagcccagtccgtcgcctgccattggacgccgcccgctcctcgtaaaggaaaaagctcggcggagggcggagtggtgcctttaaaaggccgggcgccgccttccgcctgcccgcctcctgcgccgccccttccgaggctaaatcggctgcgttcctctcggaacgcgccgcagaaggggtcctggtgacgagtcccgcgttctctcc

SEQ ID NO: 266 - DNA, 315 bp, Artificial Sequence
  Description of Artificial Sequence: Synthetic polynucleotide
  CRE0034
ccatgttcccggcgaagggccagctgtcccccgccagctagactcagcacttagtttaggaaccagtgagcaagtcagcccttggggcagcccatacaaggccatggggctgggcaagctgcacgcctgggtccggggtgggcacggtgcccgggcaacgagctgaaagctcatctactctcaggggcccctccctggggacagcccctcctggctagtcacaccctgtaggctcctctatataacccaggggcacaggggctgcccccgggtcaccaccacctccacagcacagacagacactcaggagccagc

SEQ ID NO: 267 - DNA, 170 bp, Artificial Sequence
  Description of Artificial Sequence: Synthetic polynucleotide
  CRE0037
aggtccctatatggttgtgttagagtgaacggccagcttcagcccgtctttgctccttgtttgggaagcgagtgggaggggatcagagcaaggggctatataacccttcagcgttcagcctcccgggacaccacccacccagagtggagaagcccagccagtcgctgtca

SEQ ID NO: 268 - DNA, 218 bp, Artificial Sequence
  Description of Artificial Sequence: Synthetic polynucleotide
  CRE0046
cccggcagacgctccttatacggcccggcctcgctcacctgggccgcggccaggagcgccttctttgggcagcgccgggccggggccgcgccgggcccgacacccaaatatggcgacggccggggccgcattcctgggggccgggcggcgctcccgcccgcctcgataaaaggctccggggccggcggcggcccacgagctacccggaggagcgggag

SEQ ID NO: 269 - DNA, 249 bp, Artificial Sequence
  Description of Artificial Sequence: Synthetic polynucleotide
  CRE0048
gactcaggggcgcaggcctcttgcgggggagctggcctccccgcccccacggccacgggccgccctttcctggcaggacagcgggatcttgcagctgtcaggggaggggaggcgggggctgatgtcaggagggatacaaatagtgccgacggctgggggccctgtctcccctcgccgcatccactctccggccggccgcctgcccgccgcctcctccgtgcgcccgccagcctcgcccgcgccgtcacc

SEQ ID NO: 270 - DNA, 318 bp, Artificial Sequence
  Description of Artificial Sequence: Synthetic polynucleotide
  CRE0049
catgttcccggcgaagggccagctgtcccccgccagctagactcagcacttagtttaggaaccagtgagcaagtcagcccttggggcagcccatacaaggccatggggctgggcaagctgcacgcctgggtccggggtgggcacggtgcccgggcaacgagctgaaagctcatctgctctcaggggcccctccctggggacagcccctcctggctagtcacaccctgtaggctcctctatataacccaggggcacaggggctgccctcattctaccaccacctccacagcacagacagacactcaggagccagccagc

SEQ ID NO: 271 - DNA, 70 bp, Artificial Sequence
  Description of Artificial Sequence: Synthetic oligonucleotide
  CRE0053.2 SRL_mp
ccaccgcctgctgccacggccggccgtataaatagaggcgaggagcagctgggctctcttggcagtcacc

SEQ ID NO: 272 - DNA, 451 bp, Artificial Sequence
  Description of Artificial Sequence: Synthetic polynucleotide
  CRE0054
ccagctgcctgccccctgcctggcacagcccgtacctggccgcacgctccctcacaggtgaagctcgaaaactccgtccccgtaaggagccccgctgccccccgaggcctcctccctcacgcctcgctgcgctcccggctcccgcacggccctgggagaggcccccaccgcttcgtccttaacgggcccggcggtgccgggggattatttcggccccggccccgggggggcccggcagacgctccttatacggcccggcctcgctcacctgggccgcggccaggagcgccttctttgggcagcgccgggccggggccgcgccgggcccgacacccaaatatggcgacggccggggccgcattcctgggggccgggcggcgctcccgcccgcctcgataaaaggctccggggccggcggcggcccacgagctacccggaggagcgggaggcg

SEQ ID NO: 273 - DNA, 200 bp, Artificial Sequence
  Description of Artificial Sequence: Synthetic polynucleotide
  CRE0055
tcaaagccctactctgcctgatccttttttcctgagcctcagagctaaaatgcccccgagctctttcctattggctggaaagacgaattgaagttcccttgcccatgttaggaggtgtacgcctcctgaactaaagatagaaacagctggcccttccaggcagctaaaagcctccagactaagaggtgttccccattcgg

SEQ ID NO: 274 - DNA, 251 bp, Artificial Sequence
  Description of Artificial Sequence: Synthetic polynucleotide
  CRE0056
tcaaagccctactctgcctgatccttttttcctgagcctcagagctaaaatgcccccgagctctttcctattggctggaaagacgaattgaagttcccttgcccatgttaggaggtgtacgcctcctgaactaaagatagaaacagctggcccttccaggcagctaaaagcctccagactaagaggtgttccccattcggcagccagactccttgaaataccctttcagtaatcattcaaccaacgcttcc

SEQ ID NO: 275 - DNA, 80 bp, Artificial Sequence
  Description of Artificial Sequence: Synthetic oligonucleotide
  CRE0070.2
cggccggggccgcattcctgggggccgggcggtgctcccgcccgcctcgataaaaggctccggggccggcggcggcccac

SEQ ID NO: 276 - DNA, 343 bp, Artificial Sequence
  Description of Artificial Sequence: Synthetic polynucleotide
  CRE0072
gtttcttagcagctgctgctgtgtccaaggcttggaattgctgtggtgaatctaaaactgtctcagtagtggtgagctgacctcacccaagttcaaagccctactctgcctgatccttttttcctgagcctcagagctaaaatgcccccgagctctttcctattggctggaaagacgaattgaagttcccttgcccatgttaggaggtgtacgcctcctgaactaaagatagaaacagctggcccttccaggcagctaaaagcctccagactaagaggtgttccccattcggcagccagactccttgaaataccctttcagtaatcattcaaccaacgcttcc

SEQ ID NO: 277 - DNA, 240 bp, Artificial Sequence
  Description of Artificial Sequence: Synthetic polynucleotide
  SKM_14
ttctcctctataaatacccgctctggtatttggggttggcagctgttgctgccagggagatggttgggttgacgggatcttgcagctgtcaggggaggggaggcgggggctgatgtcaggagggatacaaatagtgccgacggctgggggccctgtctcccctcgccgcatccactctccggccggccgcctgcccgccgcctcctccgtgcgcccgccagcctcgcccgcgccgtcacc

SEQ ID NO: 278 - DNA, 168 bp, Artificial Sequence
  Description of Artificial Sequence: Synthetic polynucleotide
  SKM_18.2
ataaatacccgctctggtatttggggttctcctctataaatacccgctctggtatttggggttggcagctgttgcgggatcttgcagctgtcaggggaggggaggcgggggctgatgtcaggagggatacaaatagtgccgacggctgggggccctgtctcccctcgc

SEQ ID NO: 279 - DNA, 620 bp, Artificial Sequence
  Description of Artificial Sequence: Synthetic polynucleotide
  RSV promoter
caattctcatgtttgacagcttatcatcgcagatccgtatggtgcactctcagtacaatctgctctgatgccgcatagttaagccagtatctgctccctgcttgtgtgttggaggtcgctgagtagtgcgcgagcaaaatttaagctacaacaaggcaaggcttgaccgacaattgcatgaagaatctgcttagggttaggcgttttgcgctgcttcgcgatgtacgggccagatatacgcgtatctgaggggactagggtgtgtttaggcgaaaagcggggcttcggttgtacgcggttaggagtcccctcaggatatagtagtttcgcttttgcatagggagggggaaatgtagtcttatgcaatactcttgtagtcttgcaacatggtaacgatgagttagcaacatgccttacaaggagagaaaaagcaccgtgcatgccgattggtggaagtaaggtggtacgatcgtgccttattaggaaggcaacagacgggtctgacatggattggacgaaccactgaattccgcattgcagagatattgtatttaagtgcctagctcgatacaataaacgccatttgaccattcaccacattggtgtgcacctccaagctg

SEQ ID NO: 280 - DNA, 168 bp, Artificial Sequence
  Description of Artificial Sequence: Synthetic polynucleotide
  DES_mp_v1
cgggatcttgcagctgtcaggggaggggaggcgggggctgatgtcaggagggatacaaatagtgccgacggctgggggccctgtctcccctcgccgcatccactctccggccggccgcctgcccgccgcctcctccgtgcgcccgccagcctcgcccgcgccgtcacc

SEQ ID NO: 281 - DNA, 253 bp, Artificial Sequence
  Description of Artificial Sequence: Synthetic polynucleotide
  CRE0099
ccactacgggtctaggctgcccatgtaaggaggcaaggcctggggacacccgagatgcctggttataattaacccagacatgtggctgcccccccccccccaacacctgctgcctctaaaaataaccctgtccctggtggatcccctgcatgcgaagatcttcgaacaaggctgtgggggactgagggcaggctgtaacaggcttgggggccagggcttatacgtgcctgggactcccaaagtattactgttc

SEQ ID NO: 282 - DNA, 26 bp, Artificial Sequence
  Description of Artificial Sequence: Synthetic oligonucleotide
  HTMB ev_4
ataaatacccgctctggtatttgggg

SEQ ID NO: 283 - DNA, 179 bp, Homo sapiens
  HBB
tactagcagctacaatccagctaccattctgcttttattttatggttgggataaggctggattattctgagtccaagctaggcccttttgctaatcatgttcatacctcttatcttcctcccacagctcctgggcaacgtgctggtctgtgtgctggcccatcactttggcaaagaatt

SEQ ID NO: 284 - DNA, 33 bp, Artificial Sequence
  Description of Artificial Sequence: Synthetic oligonucleotide
  minimal poly A sequence
aataaagtctgagtgggcggcagcctgtgtgtg

SEQ ID NO: 285 - DNA, 20 bp, Artificial Sequence
  Description of Artificial Sequence: Synthetic oligonucleotide
  minimal poly A sequence
aataaatgtgtgtgaataaa

SEQ ID NO: 286 - DNA, 131 bp, Artificial Sequence
  Description of Artificial Sequence: Synthetic polynucleotide
  SV40 early poly A
aacttgtttattgcagcttataatggttacaaataaagcaatagcatcacaaatttcacaaataaagcatttttttcactgcattctagttgtggtttgtccaaactcatcaatgtatcttatcatgtctg

SEQ ID NO: 287 - DNA, 127 bp, Artificial Sequence
  Description of Artificial Sequence: Synthetic polynucleotide
  RBG poly A
gatctttttccctctgccaaaaattatggggacatcatgaagccccttgagcatctgacttctggctaataaaggaaatttattttcattgcaatagtgtgttggaattttttgtgtctctcactcg

SEQ ID NO: 288 - DNA, 763 bp, Artificial Sequence
  Description of Artificial Sequence: Synthetic polynucleotide
  control 1
gggataaaagcagtctgggctttcacatgacagcatctggggctgcggcagagggtcgggtccgaagcgctgccttatcagcgtccccagccctgggaggtgacagctggctggcttgtgtcagcccctcgggcactcacgtatctccgtccgacgggtttaaaatagcaaaactctgaggccacacaatagcttgggcttatatgggctcctgtgggggaagggggagcacggagggggccggggccgctgctgccaaaatagcagctcacaagtgttgcattcctctctgggcgccgggcacattcctgctggctctgcccgccccggggtgggcgccggggggaccttaaagcctctgccccccaaggagcccttcccagacagccgccggcacccaccgctccgtgggacgatccccgaagctctagagctttattgcggtagtttatcacagttaaattgctaacgcagtcagtgcttctgacacaacagtctcgaacttaagctgcagaagttggtcgtgaggcactgggcaggtaagtatcaaggttacaagacaggtttaaggagaccaatagaaactgggcttgtcgagacagagaagactcttgcgtttctgataggcacctattggtcttactgacatccactttgcctttctctccacaggtgtccactcccagttcaattacagctcttaaggctagagtacttaatacgactcactataggctagcctcgagaattcacgcgggccgcc

SEQ ID NO: 289 - DNA, 420 bp, Artificial Sequence
  Description of Artificial Sequence: Synthetic polynucleotide
  control 2
gggataaaagcagtctgggctttcacatgacagcatctggggctgcggcagagggtcgggtccgaagcgctgccttatcagcgtccccagccctgggaggtgacagctggctggcttgtgtcagcccctcgggcactcacgtatctccgtccgacgggtttaaaatagcaaaactctgaggccacacaatagcttgggcttatatgggctcctgtgggggaagggggagcacggagggggccggggccgctgctgccaaaatagcagctcacaagtgttgcattcctctctgggcgccgggcacattcctgctggctctgcccgccccggggtgggcgccggggggaccttaaagcctctgccccccaaggagcccttcccagacagccgccggcacccaccgctccgtgggacgccacc

SEQ ID NO: 290 - DNA, 434 bp, Artificial Sequence
  Description of Artificial Sequence: Synthetic polynucleotide
  SP0376
gccactacgggtctaggctgcccatgtaaggaggcaaggcctggggacacccgagatgcctggttataattaacccagacatgtggctgccccccccccccaacacctgctgcctgagcctcacccccaccccggtgcctgggtcttaggctctgtacaccatggaggagaagctcgctctaaaaataaccctgataaatacccgctctggtatttggggtactaaaaatagaacgactatttttaggcttttctggcagctggcccgggatcttgcagctgtcaggggaggggaggcgggggctgatgtcaggagggatacaaatagtgccgacggctgggggccctgtctcccctcgccgcatccactctccggccggccgcctgcccgccgcctcctccgtgcgcccgccagcctcgcccgcgccgtcacc

SEQ ID NO: 291 - DNA, 436 bp, Artificial Sequence
  Description of Artificial Sequence: Synthetic polynucleotide
  SP0377
gccactacgggtctaggctgcccatgtaaggaggcaaggcctggggacacccgagatgcctggttataattaacccagacatgtggctgccccccccccccaacacctgctgcctgagcctcacccccaccccggtgcctgggtcttaggctctgtacaccatggaggagaagctcgctctaaaaataaccctgataaatacccgctctggtatttggggcgaggtactataaatacccttagaggtattttatcttggcagctaggtcgggatcttgcagctgtcaggggaggggaggcgggggctgatgtcaggagggatacaaatagtgccgacggctgggggccctgtctcccctcgccgcatccactctccggccggccgcctgcccgccgcctcctccgtgcgcccgccagcctcgcccgcgccgtcacc

SEQ ID NO: 292 - DNA, 522 bp, Artificial Sequence
  Description of Artificial Sequence: Synthetic polynucleotide
  SP0378
gggccccacagcagctgggggcatttatgggccttcctataaacttctgagagggtaactttatcctgcttctttcagccaagtatcctcctccagcagctggtcacaaagctggttaatctcccagagtgctcagcttaaaacccgtgactcacagcacagccagtgtgggggagggggtggctgcctccaatacgtggcgcccagagtcagctgttctggggccttctctggtttctccaactgagtcctgaggtttggggccttgtcttccttcctggagttactaaaaatagaacgactatttttaggcttttctggcagctggccctgccagacagagttcctcagtaacgggatcttgcagctgtcaggggaggggaggcgggggctgatgtcaggagggatacaaatagtgccgacggctgggggccctgtctcccctcgccgcatccactctccggccggccgcctgcccgccgcctcctccgtgcgcccgccagcctcgcccgcgccgtcacc

SEQ ID NO: 293 - DNA, 524 bp, Artificial Sequence
  Description of Artificial Sequence: Synthetic polynucleotide
  SP0379
gggccccacagcagctgggggcatttatgggccttcctataaacttctgagagggtaactttatcctgcttctttcagccaagtatcctcctccagcagctggtcacaaagctggttaatctcccagagtgctcagcttaaaacccgtgactcacagcacagccagtgtgggggagggggtggctgcctccaatacgtggcgcccagagtcagctgttctggggccttctctggtttctccaactgagtcctgaggtttggggccttgtcttccttcctggagtcgaggtactataaatacccttagaggtattttatcttggcagctaggtctgccagacagagttcctcagtaacgggatcttgcagctgtcaggggaggggaggcgggggctgatgtcaggagggatacaaatagtgccgacggctgggggccctgtctcccctcgccgcatccactctccggccggccgcctgcccgccgcctcctccgtgcgcccgccagcctcgcccgcgccgtcacc

SEQ ID NO: 294 - DNA, 522 bp, Artificial Sequence
  Description of Artificial Sequence: Synthetic polynucleotide
  SP0380
gggccccacagcagctgggggcatttatgggccttcctataaacttctgagagggtaactttatcctgcttctttcagccaagtatcctcctccagcagctggtcacaaagctggttaatctcccagagtgctcagcttaaaacccgtgactcacagcacagccagtgtgggggagggggtggctgcctccaatacgtggcgcccagagtcagctgttctggggccttctctggtttctccaactgagtcctgaggtttggggccttgtcttccttcctggagttactaaaaatagaacgactatttttaggcttttctggcagctggccctgccagacagataaacgagctatcgggatcttgcagctgtcaggggaggggaggcgggggctgatgtcaggagggatacaaatagtgccgacggctgggggccctgtctcccctcgccgcatccactctccggccggccgcctgcccgccgcctcctccgtgcgcccgccagcctcgcccgcgccgtcacc

SEQ ID NO: 295 - DNA, 524 bp, Artificial Sequence
  Description of Artificial Sequence: Synthetic polynucleotide
  SP0381
gggccccacagcagctgggggcatttatgggccttcctataaacttctgagagggtaactttatcctgcttctttcagccaagtatcctcctccagcagctggtcacaaagctggttaatctcccagagtgctcagcttaaaacccgtgactcacagcacagccagtgtgggggagggggtggctgcctccaatacgtggcgcccagagtcagctgttctggggccttctctggtttctccaactgagtcctgaggtttggggccttgtcttccttcctggagtcgaggtactataaatacccttagaggtattttatcttggcagctaggtctgccagacagataaacgagctatcgggatcttgcagctgtcaggggaggggaggcgggggctgatgtcaggagggatacaaatagtgccgacggctgggggccctgtctcccctcgccgcatccactctccggccggccgcctgcccgccgcctcctccgtgcgcccgccagcctcgcccgcgccgtcacc

SEQ ID NO: 296 - DNA, 524 bp, Artificial Sequence
  Description of Artificial Sequence: Synthetic polynucleotide
  SP0382
gggccccacagcagctgggggcatttatgggccttcctataaacttctgagagggtaactttatcctgcttctttcagccaagtatcctcctccagcagctggtcacaaagctggttaatctcccagagtgctcagcttaaaacccgtgactcacagcacagccagtgtgggggagggggtggctgcctccaatacgtggcgcccagagtcagctgttctggggccttctctggtttctccaactgagtcctgaggtttggggccttgtcttccttcctggagttaaacgagctattagttatgaggtccgtagattgaataaacgagctattagttatgaggtccgtagattgaacgggatcttgcagctgtcaggggaggggaggcgggggctgatgtcaggagggatacaaatagtgccgacggctgggggccctgtctcccctcgccgcatccactctccggccggccgcctgcccgccgcctcctccgtgcgcccgccagcctcgcccgcgccgtcacc

SEQ ID NO: 297 - DNA, 240 bp, Artificial Sequence; identical to SEQ ID NO: 277
  Description of Artificial Sequence: Synthetic polynucleotide
  SKM_14

SEQ ID NO: 298 - DNA, 335 bp, Artificial Sequence
  Description of Artificial Sequence: Synthetic polynucleotide
  SP0357
tctgagggagacagggaggcatgatcactgccaaatgcccaccaaggacaaggcacatcccagggagacagacgcagacctggtgccctctggacactggcattcctggagcccggcagacgctccttatacggcccggcctcgctcacctgggccgcggccaggagcgccttctttgggcagcgccgggccggggccgcgccgggcccgacacccaaatatggcgacggccggggccgcattcctgggggccgggcggcgctcccgcccgcctcgataaaaggctccggggccggcggcggcccacgagctacccggaggagcgggaggccacc

SEQ ID NO: 299 - DNA, 340 bp, Artificial Sequence
  Description of Artificial Sequence: Synthetic polynucleotide
  SP0437
caccgcggtggcggccgtccgccctcggatagctcgtttagacacccaaatatggcgacggtaaacgagctattgggagttatttttagagcgtaaacgagctattagttgcagcaggtgttggcgctctaaaaataactcccgggagttatttttagagcggaggaatggtggacacccaaatatggcgacggttcctcacccgtcgccatatttgggtgtccgccctcggccggggccgcattcctgggggccgggcggtgctcccgcccgcctcgataaaaggctccggggccggcggcggcccacgagctacccggaggagcgggaggcggccacc

SEQ ID NO: 300 - DNA, 365 bp, Artificial Sequence
  Description of Artificial Sequence: Synthetic polynucleotide
  SP0438
caccgcggtggcggccgtccgccctcggatagctcgtttagacacccaaatatggcgacgggtgaggaatggtggggagttatttttagagcggtgaggaaggtgggcaggcagcaggtgttggcgctctaaaaataactcccgggagttatttttagagcggaggaatggtggacacccaaatatggcgacggttcctcacccgtcgccatatttgggtgtccgccctcggccggggccgcattcctgggggccgggcggtgctcccgcccgcctcgataaaaggctccggggccggcggcggcccacgagctacccggaggagcgggaggcgccaagctctagaactagtggatcccgccacc

SEQ ID NO: 301 - DNA, 365 bp, Artificial Sequence
  Description of Artificial Sequence: Synthetic polynucleotide
  SP0439
caccgcggtggcggccgtccgccctcggcaccatcctcacgacacccaaatatggcgacggtaaacgagctattgggagttatttttagagcggtgaggaaggtgggcaggcagcaggtgttggcgctctaaaaataactcccgggagttatttttagagcggaggaatggtggacacccaaatatggcgacggttcctcacccgtcgccatatttgggtgtccgccctcggccggggccgcattcctgggggccgggcggtgctcccgcccgcctcgataaaaggctccggggccggcggcggcccacgagctacccggaggagcgggaggcgccaagctctagaactagtggatcccgccacc

SEQ ID NO: 302 - DNA, 585 bp, Artificial Sequence
  Description of Artificial Sequence: Synthetic polynucleotide
  SP0440
gggccccacagcagctgggggcatttatgggccttcctataaacttctgagagggtaactttatcctgcttctttcagccaagtatcctcctccagcagctggtcacaaagctggttaatctcccagagtgctcagcttaaaacccgtgactcacagcacagccagtgtgggggagggggtggctgcctccaatacgtggcgcccagagtcagctgttctggggccttctctggtttctccaactgagtcctgaggtttggggccttgtcttccttcctggagtacacccaaatatggcgacgggtgaggaatggtggggagttatttttagagcggtgaggaaggtgggcaggcagcaggtgttggcgctctaaaaataactcccgggagttatttttagagcggaggaatggtggacacccaaatatggcgacggttcctcacccgtcgccatatttgggtgtccgccctcggccggggccgcattcctgggggccgggcggtgctcccgcccgcctcgataaaaggctccggggccggcggcggcccacgagctacccggaggagcgggaggcgccgccacc

SEQ ID NO: 303 - DNA, 546 bp, Artificial Sequence
  Description of Artificial Sequence: Synthetic polynucleotide
  SP0441
gggccccacagcagctgggggcatttatgggccttcctataaacttctgagagggtaactttatcctgcttctttcagccaagtatcctcctccagcagctggtcacaaagctggttaatctcccagagtgctcagcttaaaacccgtgactcacagcacagccagtgtgggggagggggtggctgcctccaatacgtggcgcccagagtcagctgttctggggccttctctggtttctccaactgagtcctgaggtttggggccttgtcttccttcctggagtacacccaaatatggcgacgggtgaggaatggtggggagttatttttagagcggtgaggaaggtgggcaggcagcaggtgttggcgctctaaaaataactcccgggagttatttttagagcgcccgtcgccatatttgggtgtccgccctcggccggggccgcattcctgggggccgggcggtgctcccgcccgcctcgataaaaggctccggggccggcggcggcccacgagctacccggaggagcgggaggcgccgccacc

SEQ ID NO: 304 - DNA, 585 bp, Artificial Sequence
  Description of Artificial Sequence: Synthetic polynucleotide
  SP0442
gggccccacagcagctgggggcatttatgggccttcctataaacttctgagagggtaactttatcctgcttctttcagccaagtatcctcctccagcagctggtcacaaagctggttaatctcccagagtgctcagcttaaaacccgtgactcacagcacagccagtgtgggggagggggtggctgcctccaatacgtggcgcccagagtcagctgttctggggccttctctggtttctccaactgagtcctgaggtttggggccttgtcttccttcctggagtacacccaaatatggcgacgggtgaggaatggtggggagttatttttagagcggtgaggaaggtgggcaggcagcaggtgttggcgctctaaaaataactcccgggagttatttttagagcgagctctataaatacccgctctggtatttggggttttgaacccgtcgccatatttgggtgtccgccctcggccggggccgcattcctgggggccgggcggtgctcccgcccgcctcgataaaaggctccggggccggcggcggcccacgagctacccggaggagcgggaggcgccgccacc

SEQ ID NO: 305 - DNA, 328 bp, Artificial Sequence
  Description of Artificial Sequence: Synthetic polynucleotide
  SP0443
ggccgtccgccctcggcaccatcctcacgacacccaaatatggcgacgggtgaggaatggtggggagctatttttagagcgtaaacgagctattagttgcagcaggtgttggcgctctaaaaatagctcccgggagctatttttagagcggaggaatggtggacacccaaatatggcgacggttcctcacccgtcgccatatttgggtgtccgccctcggccggggccgcattcctgggggccgggcggtgctcccgcccgcctcgataaaaggctccggggccggcggcggcccacgagctacccggaggagcgggaggcggccacc

SEQ ID NO: 306 - DNA, 328 bp, Artificial Sequence
  Description of Artificial Sequence: Synthetic polynucleotide
  SP0444
ggccgtccgccctcggcaccatcctcacgacacccaaatatggcgacgggtgaggaatggtggggagctatttttagagcgtaaacgagctattagttgcagcaggtgttggcgctctaaaaatagctcccgggagctatttttagagcgagctctataaatacccgctctggtatttggggttttgaacccgtcgccatatttgggtgtccgccctcggccggggccgcattcctgggggccgggcggtgctcccgcccgcctcgataaaaggctccggggccggcggcggcccacgagctacccggaggagcgggaggcggccacc

SEQ ID NO: 307 - DNA, 436 bp, Artificial Sequence
  Description of Artificial Sequence: Synthetic polynucleotide
  SP0445
acacccaaatatggcgacgggtgaggaatggtggggagttatttttagagcggtgaggaaggtgggcaggcagcaggtgttggcgctctaaaaataactcccgggagttatttttagagcgagctctataaatacccgctctggtatttggggttttgaacccgtcgccatatttgggtgtccgccctataaatacccgctctggtatttggggttctcctctataaatacccgctctggtatttggggttggcagctgttgcgggatcttgcagctgtcaggggaggggaggcgggggctgatgtcaggagggatacaaatagtgccgacggctgggggccctgtctcccctcgccgcatccactctccggccggccgcctgcccgccgcctcctccgtgcgcccgccagcctcgcccgcgccgtcaccgccacc

SEQ ID NO: 308 - DNA, 291 bp, Artificial Sequence
  Description of Artificial Sequence: Synthetic polynucleotide
  SP0447
ggccgtccgccctcgggacacccaaatatggcgacgggggagttatttttagagcgggcaggcagcaggtgttggcgctctaaaaataactcccgggagttatttttagagcggaggaatggtggacacccaaatatggcgacggttcctcacccgtcgccatatttgggtgtccgccctcggccggggccgcattcctgggggccgggcggtgctcccgcccgcctcgataaaaggctccggggccggcggcggcccacgagctacccggaggagcgggaggcggccacc

SEQ ID NO: 309 - DNA, 761 bp, Artificial Sequence
  Description of Artificial Sequence: Synthetic polynucleotide
  SP0453
gggccccacagcagctgggggcatttatgggccttcctataaacttctgagagggtaactttatcctgcttctttcagccaagtatcctcctccagcagctggtcacaaagctggttaatctcccagagtgctcagcttaaaacccgtgactcacagcacagccagtgtgggggagggggtggctgcctccaatacgtggcgcccagagtcagctgttctggggccttctctggtttctccaactgagtcctgaggtttggggccttgtcttccttcctggagtcaccgcggtggcggccgtccgccctcggcaccatcctcacgacacccaaatatggcgacgggtgaggaatggtggggagttatttttagagcggtgaggaaggtgggcaggcagcaggtgttggcgctctaaaaataactcccgggagttatttttagagcggaggaatggtggacacccaaatatggcgacggttcctcacccgtcgccatatttgggtgtccgccctataaatacccgctctggtatttggggttctcctctataaatacccgctctggtatttggggttggcagctgttgcgggatcttgcagctgtcaggggaggggaggcgggggctgatgtcaggagggatacaaatagtgccgacggctgggggccctgtctcccctcgccgcatccactctccggccggccgcctgcccgccgcctcctccgtgcgcccgccagcctcgcccgcgccgtcaccgccacc

SEQ ID NO: 310 - DNA, 720 bp, Artificial Sequence
  Description of Artificial Sequence: Synthetic polynucleotide
  SP0454
gggccccacagcagctgggggcatttatgggccttcctataaacttctgagagggtaactttatcctgcttctttcagccaagtatcctcctccagcagctggtcacaaagctggttaatctcccagagtgctcagcttaaaacccgtgactcacagcacagccagtgtgggggagggggtggctgcctccaatacgtggcgcccagagtcagctgttctggggccttctctggtttctccaactgagtcctgaggtttggggccttgtcttccttcctggagtacacccaaatatggcgacgggtgaggaatggtggggagttatttttagagcggtgaggaaggtgggcaggcagcaggtgttggcgctctaaaaataactcccgggagttatttttagagcgagctctataaatacccgctctggtatttggggttttgaacccgtcgccatatttgggtgtccgccctataaatacccgctctggtatttggggttctcctctataaatacccgctctggtatttggggttggcagctgttgcgggatcttgcagctgtcaggggaggggaggcgggggctgatgtcaggagggatacaaatagtgccgacggctgggggccctgtctcccctcgccgcatccactctccggccggccgcctgcccgccgcctcctccgtgcgcccgccagcctcgcccgcgccgtcaccgccacc

SEQ ID NO: 311 - DNA, 551 bp, Artificial Sequence
  Description of Artificial Sequence: Synthetic polynucleotide
  SP0455
ccacagcagctgggggcatttatgggccttcctataaacttctgagagggtaactttatcctgcttctttcagccaagtatcctcctccaaaacccgtgactcacagcacagccagtgtgggggagggggtggctgcctccaatacgtggcgcccagagtcagctgttctggggccttctctggtttctccaactgagtcctgaggtttggcaccgcggtggcggccgtccgccctcggcaccatcctcacgacacccaaatatggcgacgggtgaggaatggtggggagttatttttagagcggtgaggaaggtgggcaggcagcaggtgttggcgctctaaaaataactcccgggagttatttttagagcggaggaatggtggacacccaaatatggcgacggttcctcacccgtcgccatatttgggtgtccgccctcggccggggccgcattcctgggggccgggcggtgctcccgcccgcctcgataaaaggctccggggccggcggcggcccacgagctacccggaggagcgggaggcggccacc

SEQ ID NO: 312 - DNA, 688 bp, Artificial Sequence
  Description of Artificial Sequence: Synthetic polynucleotide
  SP0456
ccacagcagctgggggcatttatgggccttcctataaacttctgagagggtaactttatcctgcttctttcagccaagtatcctcctccaaaacccgtgactcacagcacagccagtgtgggggagggggtggctgcctccaatacgtggcgcccagagtcagctgttctggggccttctctggtttctccaactgagtcctgaggtttggcaccgcggtggcggccgtccgccctcggcaccatcctcacgacacccaaatatggcgacgggtgaggaatggtggggagttatttttagagcggtgaggaaggtgggcaggcagcaggtgttggcgctctaaaaataactcccgggagttatttttagagcggaggaatggtggacacccaaatatggcgacggttcctcacccgtcgccatatttgggtgtccgccctataaatacccgctctggtatttggggttctcctctataaatacccgctctggtatttggggttggcagctgttgcgggatcttgcagctgtcaggggaggggaggcgggggctgatgtcaggagggatacaaatagtgccgacggctgggggccctgtctcccctcgccgcatccactctccggccggccgcctgcccgccgcctcctccgtgcgcccgccagcctcgcccgcgccgtcaccgccacc

SEQ ID NO: 313 - DNA, 621 bp, Artificial Sequence
  Description of Artificial Sequence: Synthetic polynucleotide
  SP0457
ccccacagcagctgggggcatttatgggccttcctataaacttctgagagggtaactttatcctgcttctttcagccaagtatcctcctccaaggcagtgtatactcttccataaacgagctattagttatgaggtcaaacccgtgactcacagcacagccagtgtgggggagggggtggctgcctccaatacgtggcgcccagagtcagctgttctggggccttctctggtttctccaactgagtcctgaggtttggtgacggaattcggccgaacgggacaccgcggtggcggccgtccgccctcggcaccatcctcacgacacccaaatatggcgacgggtgaggaatggtggggagttatttttagagcggtgaggaaggtgggcaggcagcaggtgttggcgctctaaaaataactcccgggagttatttttagagcggaggaatggtggacacccaaatatggcgacggttcctcacccgtcgccatatttgggtgtccgccctcggccggggccgcattcctgggggccgggcggtgctcccgcccgcctcgataaaaggctccggggccggcggcggcccacgagctacccggaggagcgggaggcggccacc

SEQ ID NO: 314 - DNA, 759 bp, Artificial Sequence
  Description of Artificial Sequence: Synthetic polynucleotide
  SP0458
gggccccacagcagctgggggcatttatgggccttcctataaacttctgagagggtaactttatcctgcttctttcagccaagtatcctcctccagcagctggtcacaaagctggttaatctcccagagtgctcagcttaaaacccgtgactcacagcacagccagtgtgggggagggggtggctgcctccaatacgtggcgcccagagtcagctgttctggggccttctctggtttctccaactgagtcctgaggtttggggccttgtcttccttcctggagtcaccgcggtggcggccgtccgccctcggcaccatcctcacgacacccaaatatggcgacgggtgaggaatggtggggagttatttttagagcggtgaggaaggtgggcaggcagcaggtgttggcgctctaaaaataactcccgggagttatttttagagcggaggaatggtggacacccaaatatggcgacggttcctcacccgtcgccatatttgggtgtccgccctttctcctctataaatacccgctctggtatttggggttggcagctgttgctgccagggagatggttgggttgacgggatcttgcagctgtcaggggaggggaggcgggggctgatgtcaggagggatacaaatagtgccgacggctgggggccctgtctcccctcgccgcatccactctccggccggccgcctgcccgccgcctcctccgtgcgcccgccagcctcgcccgcgccgtcaccgccacc

SEQ ID NO: 315 - DNA, 837 bp, Artificial Sequence
  Description of Artificial Sequence: Synthetic polynucleotide
  SP0459
gggccccacagcagctgggggcatttatgggccttcctataaacttctgagagggtaactttatcctgcttctttcagccaagtatcctcctccagcagctggtcacaaagctggttaatctcccagagtgctcagcttaaaacccgtgactcacagcacagccagtgtgggggagggggtggctgcctccaatacgtggcgcccagagtcagctgttctggggccttctctggtttctccaactgagtcctgaggtttggggccttgtcttccttcctggagtcaccgcggtggcggccgtccgccctcggcaccatcctcacgacacccaaatatggcgacgggtgaggaatggtggggagttatttttagagcggtgaggaaggtgggcaggcagcaggtgttggcgctctaaaaataactcccgggagttatttttagagcggaggaatggtggacacccaaatatggcgacggttcctcacccgtcgccatatttgggtgtccgccctcatgttcccggcgaagggccagctgtcccccgccagctagactcagcacttagtttaggaaccagtgagcaagtcagcccttggggcagcccatacaaggccatggggctgggcaagctgcacgcctgggtccggggtgggcacggtgcccgggcaacgagctgaaagctcatctgctctcaggggcccctccctggggacagcccctcctggctagtcacaccctgtaggctcctctatataacccaggggcacaggggctgccctcattctaccaccacctccacagcacagacagacactcaggagccagccagcgccacc

SEQ ID NO: 316 - DNA, 298 bp, Artificial Sequence
  Description of Artificial Sequence: Synthetic polynucleotide
  SP0460
caccgcggtggcggccgtccgccctcggcaccatcctcacgacacccaaatatggcgacgggtgaggaatggtggggagttatttttagagcggtgaggaaggtgggcaggcagcaggtgttggcgctctaaaaataactcccgggagttatttttagagcgcggccggggccgcattcctgggggccgggcggtgctcccgcccgcctcgataaaaggctccggggccggcggcggcccacgagctacccggaggagcgggaggcgccaagctctagaactagtggatcccgccacc

SEQ ID NO: 317 - DNA, 365 bp, Artificial Sequence
  Description of Artificial Sequence: Synthetic polynucleotide
  SP0461
caccgcggtggcggccgtccgccctcggcaccatcctcacgacacccaaatatggcgacgggtgaggaatggtggggagttatttttagagcggtgaggaaggtgggcaggcagcaggtgttggcgctctaaaaataactcccgggagttatttttagagcgaggcagtgtatactcttccataaacgagctattagttatgaggtccgtagattgaaaagggtgacggcggccggggccgcattcctgggggccgggcggtgctcccgcccgcctcgataaaaggctccggggccggcggcggcccacgagctacccggaggagcgggaggcgccaagctctagaactagtggatcccgccacc

SEQ ID NO: 318 - DNA, 356 bp, Artificial Sequence
  Description of Artificial Sequence: Synthetic polynucleotide
  SP0462
ctctataaatacccgctctggtatttggggttacacccaaatatggcgacgggtgaggaatggtggggagttatttttagagcggtgaggaaggtgggcaggcagcaggtgttggcgctctaaaaataactcccgggagttatttttagagcggaggaatggtggacacccaaatatggcgacggttcctcacccgtcgccatatttgggtgtccgccctcggccggggccgcattcctgggggccgggcggtgctcccgcccgcctcgataaaaggctccggggccggcggcggcccacgagctacccggaggagcgggaggcgccaagctctagaactagtggatcccgccacc

SEQ ID NO: 319 - DNA, 772 bp, Artificial Sequence
  Description of Artificial Sequence: Synthetic polynucleotide
  SP0463
gggccccacagcagctgggggcatttatgggccttcctataaacttctgagagggtaactttatcctgcttctttcagccaagtatcctcctccagcagctggtcacaaagctggttaatctcccagagtgctcagcttaaaacccgtgactcacagcacagccagtgtgggggagggggtggctgcctccaatacgtggcgcccagagtcagctgttctggggccttctctggtttctccaactgagtcctgaggtttggggccttgtcttccttcctggagtcaccgcggtggcggccgtccgccctcggcaccatcctcacgacacccaaatatggcgacgggtgaggaatggtggggagttatttttagagcggtgaggaaggtgggcaggcagcaggtgttggcgctctaaaaataactcccgggagttatttttagagcggaggaatggtggacacccaaatatggcgacggttcctcacccgtcgccatatttgggtgtccgccctccactacgggtctaggctgcccatgtaaggaggcaaggcctggggacacccgagatgcctggttataattaacccagacatgtggctgcccccccccccccaacacctgctgcctctaaaaataaccctgtccctggtggatcccctgcatgcgaagatcttcgaacaaggctgtgggggactgagggcaggctgtaacaggcttgggggccagggcttatacgtgcctgggactcccaaagtattactgttcgccacc

SEQ ID NO: 320 - DNA, 837 bp, Artificial Sequence
  Description of Artificial Sequence: Synthetic polynucleotide
  SP0464
caccgcggtggcggccgtccgccctcggcaccatcctcacgacacccaaatatggcgacgggtgaggaatggtggggagttatttttagagcggtgaggaaggtgggcaggcagcaggtgttggcgctctaaaaataactcccgggagttatttttagagcggaggaatggtggacacccaaatatggcgacggttcctcacccgtcgccatatttgggtgtccgccctgggccccacagcagctgggggcatttatgggccttcctataaacttctgagagggtaactttatcctgcttctttcagccaagtatcctcctccagcagctggtcacaaagctggttaatctcccagagtgctcagcttaaaacccgtgactcacagcacagccagtgtgggggagggggtggctgcctccaatacgtggcgcccagagtcagctgttctggggccttctctggtttctccaactgagtcctgaggtttggggccttgtcttccttcctggagtcatgttcccggcgaagggccagctgtcccccgccagctagactcagcacttagtttaggaaccagtgagcaagtcagcccttggggcagcccatacaaggccatggggctgggcaagctgcacgcctgggtccggggtgggcacggtgcccgggcaacgagctgaaagctcatctgctctcaggggcccctccctggggacagcccctcctggctagtcacaccctgtaggctcctctatataacccaggggcacaggggctgccctcattctaccaccacctccacagcacagacagacactcaggagccagccagcgccacc

SEQ ID NO: 321 - DNA, 772 bp, Artificial Sequence
  Description of Artificial Sequence: Synthetic polynucleotide
  SP0465
caccgcggtggcggccgtccgccctcggcaccatcctcacgacacccaaatatggcgacgggtgaggaatggtggggagttatttttagagcggtgaggaaggtgggcaggcagcaggtgttggcgctctaaaaataactcccgggagttatttttagagcggaggaatggtggacacccaaatatggcgacggttcctcacccgtcgccatatttgggtgtccgccctgggccccacagcagctgggggcatttatgggccttcctataaacttctgagagggtaactttatcctgcttctttcagccaagtatcctcctccagcagctggtcacaaagctggttaatctcccagagtgctcagcttaaaacccgtgactcacagcacagccagtgtgggggagggggtggctgcctccaatacgtggcgcccagagtcagctgttctggggccttctctggtttctccaactgagtcctgaggtttggggccttgtcttccttcctggagtccactacgggtctaggctgcccatgtaaggaggcaaggcctggggacacccgagatgcctggttataattaacccagacatgtggctgcccccccccccccaacacctgctgcctctaaaaataaccctgtccctggtggatcccctgcatgcgaagatcttcgaacaaggctgtgggggactgagggcaggctgtaacaggcttgggggccagggcttatacgtgcctgggactcccaaagtattactgttcgccacc

SEQ ID NO: 322 - DNA, 764 bp, Artificial Sequence
  Description of Artificial Sequence: Synthetic polynucleotide
  SP0466
caccgcggtggcggccgtccgccctcggcaccatcctcacgacacccaaatatggcgacgggtgaggaatggtggggagttatttttagagcggtgaggaaggtgggcaggcagcaggtgttggcgctctaaaaataactcccgggagttatttttagagcggaggaatggtggacacccaaatatggcgacggttcctcacccgtcgccatatttgggtgtccgccctccacagcagctgggggcatttatgggccttcctataaacttctgagagggtaactttatcctgcttctttcagccaagtatcctcctccaaaacccgtgactcacagcacagccagtgtgggggagggggtggctgcctccaatacgtggcgcccagagtcagctgttctggggccttctctggtttctccaactgagtcctgaggtttggcatgttcccggcgaagggccagctgtcccccgccagctagactcagcacttagtttaggaaccagtgagcaagtcagcccttggggcagcccatacaaggccatggggctgggcaagctgcacgcctgggtccggggtgggcacggtgcccgggcaacgagctgaaagctcatctgctctcaggggcccctccctggggacagcccctcctggctagtcacaccctgtaggctcctctatataacccaggggcacaggggctgccctcattctaccaccacctccacagcacagacagacactcaggagccagccagcgccacc

SEQ ID NO: 323 - DNA, 671 bp, Artificial Sequence
  Description of Artificial Sequence: Synthetic polynucleotide
  SP0467
gccactacgggtctaggctgcccatgtaaggaggcaaggcctggggacacccgagatgcctggttataattaacccagacatgtggctgccccccccccccaacacctgctgcctgagcctcacccccaccccggtgcctgggtcttaggctctgtacaccatggaggagaagctcgctctaaaaataaccctgcaccgcggtggcggccgtccgccctcggcaccatcctcacgacacccaaatatggcgacgggtgaggaatggtggggagttatttttagagcggtgaggaaggtgggcaggcagcaggtgttggcgctctaaaaataactcccgggagttatttttagagcggaggaatggtggacacccaaatatggcgacggttcctcacccgtcgccatatttgggtgtccgccctataaatacccgctctggtatttggggttctcctctataaatacccgctctggtatttggggttggcagctgttgcgggatcttgcagctgtcaggggaggggaggcgggggctgatgtcaggagggatacaaatagtgccgacggctgggggccctgtctcccctcgccgcatccactctccggccggccgcctgcccgccgcctcctccgtgcgcccgccagcctcgcccgcgccgtcaccgccacc

SEQ ID NO: 324 - DNA, 671 bp, Artificial Sequence
  Description of Artificial Sequence: Synthetic polynucleotide
  SP0468
caccgcggtggcggccgtccgccctcggcaccatcctcacgacacccaaatatggcgacgggtgaggaatggtggggagttatttttagagcggtgaggaaggtgggcaggcagcaggtgttggcgctctaaaaataactcccgggagttatttttagagcggaggaatggtggacacccaaatatggcgacggttcctcacccgtcgccatatttgggtgtccgccctgccactacgggtctaggctgcccatgtaaggaggcaaggcctggggacacccgagatgcctggttataattaacccagacatgtggctgccccccccccccaacacctgctgcctgagcctcacccccaccccggtgcctgggtcttaggctctgtacaccatggaggagaagctcgctctaaaaataaccctgataaatacccgctctggtatttggggttctcctctataaatacccgctctggtatttggggttggcagctgttgcgggatcttgcagctgtcaggggaggggaggcgggggctgatgtcaggagggatacaaatagtgccgacggctgggggccctgtctcccctcgccgcatccactctccggccggccgcctgcccgccgcctcctccgtgcgcccgccagcctcgcccgcgccgtcaccgccacc

SEQ ID NO: 325 - DNA, 506 bp, Artificial Sequence
  Description of Artificial Sequence: Synthetic polynucleotide
  SP0469
ccacagcagctgggggcatttctgagagggtaactttatcctgcttctttcagccaagtactcacagcacagccagtgtgggggagggggtggctgcctccgtggcgcccagagtcagctgttctggggccttctctggtttctccaactgagtcctgaggtttggcaccgcggtggcggccgtccgccctcggcaccatcctcacgacacccaaatatggcgacgggtgaggaatggtggggagttatttttagagcggtgaggaaggtgggcaggcagcaggtgttggcgctctaaaaataactcccgggagttatttttagagcggaggaatggtggacacccaaatatggcgacggttcctcacccgtcgccatatttgggtgtccgccctcggccggggccgcattcctgggggccgggcggtgctcccgcccgcctcgataaaaggctccggggccggcggcggcccacgagctacccggaggagcgggaggcggccacc

SEQ ID NO: 326 - DNA, 365 bp, Artificial Sequence
  Description of Artificial Sequence: Synthetic polynucleotide
  SP0470
caccgcggtggcggccgtccgccctcggcaccatcctcacgacacccaaatatggcgacgggtgaggaatggtggggataaacgagctatgcggtgaggaaggtgggcaggcagcaggtgttggcgcatagctcgtttatcccgggataaacgagctatgcggaggaatggtggacacccaaatatggcgacggttcctcacccgtcgccatatttgggtgtccgccctcggccggggccgcattcctgggggccgggcggtgctcccgcccgcctcgataaaaggctccggggccggcggcggcccacgagctacccggaggagcgggaggcgccaagctctagaactagtggatcccgccacc

SEQ ID NO: 327 - DNA, 624 bp, Artificial Sequence
  Description of Artificial Sequence: Synthetic polynucleotide
  SP0471
caccgcggtggcggccgtccgccctcggcaccatcctcacgacacccaaatatggcgacgggtgaggaatggtggggagttatttttagagcggtgaggaaggtgggcaggcagcaggtgttggcgctctaaaaataactcccgggagttatttttagagcggaggaatggtggacacccaaatatggcgacggttcctcacccgtcgccatatttgggtgtccgccctgggccccacagcagctgggggcatttatgggccttcctataaacttctgagagggtaactttatcctgcttctttcagccaagtatcctcctccagcagctggtcacaaagctggttaatctcccagagtgctcagcttaaaacccgtgactcacagcacagccagtgtgggggagggggtggctgcctccaatacgtggcgcccagagtcagctgttctggggccttctctggtttctccaactgagtcctgaggtttggggccttgtcttccttcctggagtcggccggggccgcattcctgggggccgggcggtgctcccgcccgcctcgataaaaggctccggggccggcggcggcccacgagctacccggaggagcgggaggcggccacc

SEQ ID NO: 328 - DNA, 718 bp, Artificial Sequence
  Description of Artificial Sequence: Synthetic polynucleotide
  SP0473
gggccccacagcagctgggggcatttatgggccttcctataaacttctgagagggtaactttatcctgcttctttcagccaagtatcctcctccagcagctggtcacaaagctggttaatctcccagagtgctcagcttaaaacccgtgactcacagcacagccagtgtgggggagggggtggctgcctccaatacgtggcgcccagagtcagctgttctggggccttctctggtttctccaactgagtcctgaggtttggggccttgtcttccttcctggagtacacccaaatatggcgacgggtgaggaatggtggggagttatttttagagcggtgaggaaggtgggcaggcagcaggtgttggcgctctaaaaataactcccgggagttatttttagagcgagctctataaatacccgctctggtatttggggttttgaacccgtcgccatatttgggtgtccgccctttctcctctataaatacccgctctggtatttggggttggcagctgttgctgccagggagatggttgggttgacgggatcttgcagctgtcaggggaggggaggcgggggctgatgtcaggagggatacaaatagtgccgacggctgggggccctgtctcccctcgccgcatccactctccggccggccgcctgcccgccgcctcctccgtgcgcccgccagcctcgcccgcgccgtcaccgccacc

SEQ ID NO: 329 - DNA, 465 bp, Artificial Sequence
  Description of Artificial Sequence: Synthetic polynucleotide
  SP0474
ccacagcagctgggggcatttctgagagggtaactttatcctgcttctttcagccaagtactcacagcacagccagtgtgggggagggggtggctgcctccgtggcgcccagagtcagctgttctggggccttctctggtttctccaactgagtcctgaggtttggacacccaaatatggcgacgggtgaggaatggtggggagttatttttagagcggtgaggaaggtgggcaggcagcaggtgttggcgctctaaaaataactcccgggagttatttttagagcgagctctataaatacccgctctggtatttggggttttgaacccgtcgccatatttgggtgtccgccctcggccggggccgcattcctgggggccgggcggtgctcccgcccgcctcgataaaaggctccggggccggcggcggcccacgagctacccggaggagcgggaggcggccacc

SEQ ID NO: 330 - DNA, 555 bp, Human betaherpesvirus 5
  CMV promoter
taatagtaatcaattacggggtcattagttcatagcccatatatggagttccgcgttacataacttacggtaaatggcccgcctggctgaccgcccaacgacccccgcccattgacgtcaataatgacgtatgttcccatagtaacgccaatagggactttccattgacgtcaatgggtggagtatttacggtaaactgcccacttggcagtacatcaagtgtatcatatgccaagtccgccccctattgacgtcaatgacggtaaatggcccgcctggcattatgcccagtacatgaccttacgggactttcctacttggcagtacatctacgtattagtcatcgctattaccatggtgatgcggttttggcagtacaccaatgggcgtggatagcggtttgactcacggggatttccaagtctccaccccattgacgtcaatgggagtttgttttggcaccaaaatcaacgggactttccaaaatgtcgtaataaccccgccccgttgacgcaaatgggcggtaggcgtgtacggtgggaggtctatataagc

SEQ ID NO: 331 - DNA, 511 bp, Homo sapiens
  hGH poly(A) signal and Terminator sequence
ctgtggcttctagctgcccgggtggcatccctgtgacccctccccagtgcctctcctggccctggaagttgccactccagtgcccaccagccttgtcctaataaaattaagttgcatcattttgtctgactaggtgtccttctataatattatggggtggaggggggtggtatggagcaaggggcaagttgggaagacaacctgtagggcctgcggggtctattgggaaccaagctggagtgcagtggcacaatcttggctcactgcaatctccgcctcctgggttcaagcgattctcctgcctcagcctcccgagttgttgggattccaggcatgcatgaccaggctcagctaatttttgtttttttggtagagacggggtttcaccatattggccaggctggtctccaactcctaatctcaggtgatctacccaccttggcctcccaaattgctgggattacaggcgtgaaccactgctcccttccctgtccttctgattttaaaaaaa

SEQ ID NO: 332 - DNA, 92 bp, Artificial Sequence
  Description of Artificial Sequence: Synthetic oligonucleotide
  double stranded termination element
agagaaatgttctggcacctgcacttgcactggggacagcctattttgctagtttgttttgtttcgttttgttttgatggagagcgtatgtt

SEQ ID NO: 333 - skipped

SEQ ID NO: 334 - DNA, 218 bp, Artificial Sequence
  Description of Artificial Sequence: Synthetic polynucleotide
  SV40 poly A
taccacatttgtagaggttttacttgctttaaaaaacctcccacacctccccctgaacctgaaacataaaatgaatgcaattgttgttgttaacttgtttattgcagcttataatggttacaaataaagcaatagcatcacaaatttcacaaataaagcatttttttcactgcattctagttgtggtttgtccaaactcatcaatgtatcttaaggcg

SEQ ID NO: 335 - DNA, 75 bp, Artificial Sequence
  Description of Artificial Sequence: Synthetic oligonucleotide
  FULL synthetic poly A sequence
aataaagtctgagtgggcggcagcctgtgtgtgcctgggttctctctgtcccggaatgtgcaaacaatggaggtg

SEQ ID NO: 336 - DNA, 251 bp, Artificial Sequence
  Description of Artificial Sequence: Synthetic polynucleotide
  SP0502
ctagactagcatgctgcccatgtaaggaggcaaggcctggggacacccgagatgcctggttataattaacccagacatgtggctgcccccccccccccaacacctgctgcctctaaaaataaccctgcttctcctctataaatacccgctctggtatttggggttggcagctgttgcaccgcctgctgccacggccggccgtataaatagaggcgaggagcagctgggctctcttggcagtcaccgccacc

SEQ ID NO: 337 - DNA, 235 bp, Artificial Sequence
  Description of Artificial Sequence: Synthetic polynucleotide
  SP0515
ctagactagcatgctgcccatgtaaggaggcaaggcctggggacacccgagatgcctggttataattaacccagacatgtggctgcccccccccccccaacacctgctgcctctaaaaataaccctgcttctcctctataaatacccgctctggtatttggggttggcagctgttggggctgggcataaaagtcagggcagagccatctattgcttacatttgcttctggccacc

SEQ ID NO: 338 - DNA, 263 bp, Artificial Sequence
  Description of Artificial Sequence: Synthetic polynucleotide
  SP0521
ctagactagcatgctgcccatgtaaggaggcaaggcctggggacacccgagatgcctggttataattaacccagacatgtggctgcccccccccccccaacacctgctgcctctaaaaataaccctgcttctcctctataaatacccgctctggtatttggggttggcagctgttggtacttatataagggggtgggggcgcgttcgtcctcagtcgcgatcgaacactcgagccgagcagacgtgcctacggaccggccacc

SEQ ID NO: 339 - DNA, 287 bp, Artificial Sequence
  Description of Artificial Sequence: Synthetic polynucleotide
  SP4169
ctagactagcatgctgcccatgtaaggaggcaaggcctggggacacccgagatgcctggttataattaacccagacatgtggctgcccccccccccccaacacctgctgcctctaaaaataaccctgcttctcctctataaatacccgctctggtatttggggttggcagctgttgcggccggggccgcattcctgggggccgggcggtgctcccgcccgcctcgataaaaggctccggggccggcggcggcccacgagctacccggaggagcgggaggcggccacc

SEQ ID NO: 340 - DNA, 237 bp, Artificial Sequence
  Description of Artificial Sequence: Synthetic polynucleotide
  SP0522
gctgcccatgtaaggaggcaaggcctggggacacccgagatgcctggttataattaacccagacatgtggctgccccccccccccaacacctgctgcctctaaaaataaccctgttctcctctataaatacccgctctggtatttggggttggcagctgttgcaccgcctgctgccacggccggccgtataaatagaggcgaggagcagctgggctctcttggcagtcaccgccacc

SEQ ID NO: 341 - DNA, 221 bp, Artificial Sequence
  Description of Artificial Sequence: Synthetic polynucleotide
  SP0523
gctgcccatgtaaggaggcaaggcctggggacacccgagatgcctggttataattaacccagacatgtggctgccccccccccccaacacctgctgcctctaaaaataaccctgttctcctctataaatacccgctctggtatttggggttggcagctgttggggctgggcataaaagtcagggcagagccatctattgcttacatttgcttctggccacc

SEQ ID NO: 342 - DNA, 249 bp, Artificial Sequence
  Description of Artificial Sequence: Synthetic polynucleotide
  SP0524
gctgcccatgtaaggaggcaaggcctggggacacccgagatgcctggttataattaacccagacatgtggctgccccccccccccaacacctgctgcctctaaaaataaccctgttctcctctataaatacccgctctggtatttggggttggcagctgttggtacttatataagggggtgggggcgcgttcgtcctcagtcgcgatcgaacactcgagccgagcagacgtgcctacggaccggccacc

SEQ ID NO: 343 - DNA, 114 bp, Artificial Sequence
  Description of Artificial Sequence: Synthetic polynucleotide
  CRE0145
gctgcccatgtaaggaggcaaggcctggggacacccgagatgcctggttataattaacccagacatgtggctgccccccccccccaacacctgctgcctctaaaaataaccctg

SEQ ID NO: 344 - DNA, 69 bp, Artificial Sequence
  Description of Artificial Sequence: Synthetic oligonucleotide
  CRE0053
caccgcctgctgccacggccggccgtataaatagaggcgaggagcagctgggctctcttggcagtcacc

SEQ ID NO: 345 - DNA, 53 bp, Artificial Sequence
  Description of Artificial Sequence: Synthetic oligonucleotide
  BG_mp
gggctgggcataaaagtcagggcagagccatctattgcttacatttgcttctg

SEQ ID NO: 346 - DNA, 81 bp, Artificial Sequence
  Description of Artificial Sequence: Synthetic oligonucleotide
  SCP1
gtacttatataagggggtgggggcgcgttcgtcctcagtcgcgatcgaacactcgagccgagcagacgtgcctacggaccg

SEQ ID NO: 347 - DNA, 176 bp, Artificial Sequence
  Description of Artificial Sequence: Synthetic polynucleotide
  CRM_SP0502, SP0515, SP0521, and SP4169
ctagactagcatgctgcccatgtaaggaggcaaggcctggggacacccgagatgcctggttataattaacccagacatgtggctgcccccccccccccaacacctgctgcctctaaaaataaccctgcttctcctctataaatacccgctctggtatttggggttggcagctgttg

SEQ ID NO: 348-350 - skipped (3 entries)

SEQ ID NO: 351 - DNA, 162 bp, Artificial Sequence
  Description of Artificial Sequence: Synthetic polynucleotide
  CRM_SP0522, SP0523, and SP0524
gctgcccatgtaaggaggcaaggcctggggacacccgagatgcctggttataattaacccagacatgtggctgccccccccccccaacacctgctgcctctaaaaataaccctgttctcctctataaatacccgctctggtatttggggttggcagctgttg

SEQ ID NO: 352-356 - skipped (5 entries)

SEQ ID NO: 357 - DNA, 6065 bp, Artificial Sequence
  Description of Artificial Sequence: Synthetic polynucleotide
  I-1c.v1 (I-I+B)
cagctggcgtaatagcgaagaggcccgcaccgatcgcccttcccaacagttgcgcagcctgaatggcgaatggcgattccgttgcaatggctggcggtaatattgttctggatattaccagcaaggccgatagtttgagttcttctactcaggcaagtgatgttattactaatcaaagaagtattgcgacaacggttaatttgcgtgatggacagactcttttactcggtggcctcactgattataaaaacacttctcaggattctggcgtaccgttcctgtctaaaatccctttaatcggcctcctgtttagctcccgctctgattctaacgaggaaagcacgttatacgtgctcgtcaaagcaaccatagtacgcgccctgtagcggcgcattaagcgcggcgggtgtggtggttacgcgcagcgtgaccgctacacttgccagcgccctagcgcccgctcctttcgctttcttcccttcctttctcgccacgttcgccggctttccccgtcaagctctaaatcgggggctccctttagggttccgatttagtgctttacggcacctcgaccccaaaaaacttgattagggtgatggttcacgtagtgggccatcgccctgatagacggtttttcgccctttgacgttggagtccacgttctttaatagtggactcttgttccaaactggaacaacactcaaccctatctcggtctattcttttgatttataagggattttgccgatttcggcctattggttaaaaaatgagctgatttaacaaaaatttaacgcgaattttaacaaaatattaacgcttacaatttaaatatttgcttatacaatcttcctgtttttggggcttttctgattatcaaccggggtacatatgattgacatgctagttttacgattaccgttcatcgtctagagctagcatatggatccatcgatttagggataacagggtaattatcagcacacaattgcccattatacgcgcgtataatggactattgtgtgctgatatctgtacacttaagggctagatcttagcttacgtcactagagggtccacgtttagtttttaagatccattgatctcctaaacgctgcaagattcgcaacctggtatacttagcctaggcgctaggtcctagtgcagcgggactttttttctaaagtcgttgagaggaggagtcgtcagaccagatagctttgatgtcctgatcggaaggatcgttggcccccctgcaggcagctgttaattaaccgattcattaatgcagcagctgcgcgctcgctcgctcactgaggccgcccgggcaaagcccgggcgtcgggcgacctttggtcgcccggcctcagtgagcgagcgagcgcgcagagagggagtggcgcgccacgcgtggatctaatagtaatcaattacggggtcattagttcatagcccatatatggagttccgcgttacataacttacggtaaatggcccgcctggctgaccgcccaacgacccccgcccattgacgtcaataatgacgtatgttcccatagtaacgccaatagggactttccattgacgtcaatgggtggagtatttacggtaaactgcccacttggcagtacatcaagtgtatcatatgccaagtccgccccctattgacgtcaatgacggtaaatggcccgcctggcattatgcccagtacatgaccttacgggactttcctacttggcagtacatctacgtattagtcatcgctattaccatggtgatgcggttttggcagtacaccaatgggcgtggatagcggtttgactcacggggatttccaagtctccaccccattgacgtcaatgggagtttgttttggcaccaaaatcaacgggactttccaaaatgtcgtaataaccccgccccgttgacgcaaatgggcggtaggcgtgtacggtgggaggtctatataagcagagctcgtttagtgaaccgtcagatcactagaagctttattgcggtagtttatcacagttaaattgctaacgcagtcagtgcttctgacacaacagtctcgaacttaagctgcagaagttggtcgtgaggcactgggcaggtaagtatcaaggttacaagacaggtttaaggagaccaatagaaactgggcttgtcgagacagagaagactcttgcgtttctgataggcacctattggtcttactgacatccactttgcctttctctccacaggtgtccactcccagttcaattacagctcttaaggctagagtacttaatacgactcactataggctagcctcgacggtaccgccaccatggaacaggacaacagcccccggaagatccagttcaccgtgcccctgctggaaccccacctggaccccgaggccgccgagcagatccggcggagaaggcccgaccccgccaccctggtgctgaccagcgaccagagcagccccgagatcgacgaggaccggatccccaacccccacctgaagagcaccctggcctgatgagggccgcgactctagatcataatcagccataccacatttgtagaggttttacttgctttaaaaaacctcccacacctccccctgaacctgaaacataaaatgaatgcaattgttgttgttaacttgtttattgcagcttataatggttacaaataaagcaatagcatcacaaatttcacaaataaagcatttttttcactgcattctagttgtggtttgtccaaactcatcaatgtatcttaaggcgggaattgatctgtttaaacgcggccgcaggaacccctagtgatggagttggccactccctctctgcgcgctcgctcgctcactgaggccgggcgaccaaaggtcgcccgacgcccgggctttgcccgggcggcctcagtgagcgagcgagcgcgcagagagggagtggccaactggcgtaatagcgaagaggttaattaaggcgccctaggccgacccttagactctgtactcagttctataaacgagccattggatacgagatccgtagattgataagggacacggaatatccccggacgcaatagacaccggtggacagcttggtatcctgagcacagtcgcgcgtccgaatctagctctactttagaggccccggattctgatggtcgtagaccgcagaaccgattggggggatgagatctactagttatcagcacacaattgcccattatacgcgcgtataatggactattgtgtgctgatatagggataacagggtaattctagagctagcatatggatccatcgatttattctcttgtttgctccagactctcaggcaatgacctgatagcctttgtagagacctctcaaaaatagctaccctctccggcatgaatttatcagctagaacggttgaatatcatattgatggtgatttgactgtctccggcctttctcacccgtttgaatctttacctacacattactcaggcattgcatttaaaatatatgagggttctaaaaatttttatccttgcgttgaaataaaggcttctcccgcaaaagtattacagggtcataatgtttttggtacaaccgatttagctttatgctctgaggctttattgcttaattttgctaattctttgccttgcctgtatgatttattggatgttggaatcgcctgatgcggtattttctccttacgcatctgtgcggtatttcacaccgcatatggtgcactctcagtacaatctgctctgatgccgcatagttaagccagccccgacacccgccaacacccgctgacgcgccctgacgggcttgtctgctcccggcatccgcttacagacaagctgtgaccgtctccgggagctgcatgtgtcagaggttttcaccgtcatcaccgaaacgcgcgagacgaaagggcctcgtgatacgcctatttttataggttaatgtcatgataataatggtttcttagacgtcagggtaccgggccccccctcgaggtcgacggtatcgataagcttgatatcgaattcctcggggaaatgtgcgcggaacccctatttgtttatttttctaaatacattcaaatatgtatccgctcatgagacaataaccctgataaatgcttcaataatattgaaaaaggaagagtatgagccatattcaacgggaaacgtcgaggccgcgattaaattccaacatggatgctgatttatatgggtataaatgggctcgcgataatgtcgggcaatcaggtgcgacaatctatcgcttgtatgggaagcccgatgcgccagagttgtttctgaaacatggcaaaggtagcgttgccaatgatgttacagatgagatggtcagactaaactggctgacggaatttatgcctcttccgaccatcaagcattttatccgtactcctgatgatgcatggttactcaccactgcgatccccggaaaaacagcattccaggtattagaagaatatcctgattcaggtgaaaatattgttgatgcgctggcagtgttcctgcgccggttgcattcgattcctgtttgtaattgtccttttaacagcgatcgcgtatttcgtctcgctcaggcgcaatcacgaatgaataacggtttggttgatgcgagtgattttgatgacgagcgtaatggctggcctgttgaacaagtctggaaagaaatgcataaacttttgccattctcaccggattcagtcgtcactcatggtgatttctcacttgataaccttatttttgacgaggggaaattaataggttgtattgatgttggacgagtcggaatcgcagaccgataccaggatcttgccatcctatggaactgcctcggtgagttttctccttcattacagaaacggctttttcaaaaatatggtattgataatcctgatatgaataaattgcagtttcatttgatgctcgatgagtttttctaagcgtataatggtctagagctagcatatggatccatcgattccattatacgcctgtcagaccaagtttactcatatatactttagattgatttaaaacttcatttttaatttaaaaggatctaggtgaagatcctttttgataatctcatgaccaaaatcccttaacgtgagttttcgttccactgagcgtcagaccccgtagaaaagatcaaaggatcttcttgagatcctttttttctgcgcgtaatctgctgcttgcaaacaaaaaaaccaccgctaccagcggtggtttgtttgccggatcaagagctaccaactctttttccgaaggtaactggcttcagcagagcgcagataccaaatactgttcttctagtgtagccgtagttaggccaccacttcaagaactctgtagcaccgcctacatacctcgctctgctaatcctgttaccagtggctgctgccagtggcgataagtcgtgtcttaccgggttggactcaagacgatagttaccggataaggcgcagcggtcgggctgaacggggggttcgtgcacacagcccagcttggagcgaacgacctacaccgaactgagatacctacagcgtgagctatgagaaagcgccacgcttcccgaagggagaaaggcggacaggtatccggtaagcggcagggtcggaacaggagagcgcacgagggagcttccagggggaaacgcctggtatctttatagtcctgtcgggtttcgccacctctgacttgagcgtcgatttttgtgatgctcgtcaggggggcggagcctatggaaaaacgccagcaacgcggcctttttacggttcctggcctttttttcctgcagcccgggggatccaagttctagagcccgccaccgcggtggagctcgctcacatgttctttcctgcgttatcccctgattctgtggataaccgtattaccgcctttgagtgagctgataccgctcgccgcagccgaacgaccgagcgcagcgagtcagtgagcgaggaagcggaagagcgcccaatacgcaaaccgcctctccccgcgcgttggccgattcattaatg

SEQ ID NO: 358 - DNA, 6051 bp, Artificial Sequence
  Description of Artificial Sequence: Synthetic polynucleotide
  I-1c.v2 (I-I+B)
cagctggcgtaatagcgaagaggcccgcaccgatcgcccttcccaacagttgcgcagcctgaatggcgaatggcgattccgttgcaatggctggcggtaatattgttctggatattaccagcaaggccgatagtttgagttcttctactcaggcaagtgatgttattactaatcaaagaagtattgcgacaacggttaatttgcgtgatggacagactcttttactcggtggcctcactgattataaaaacacttctcaggattctggcgtaccgttcctgtctaaaatccctttaatcggcctcctgtttagctcccgctctgattctaacgaggaaagcacgttatacgtgctcgtcaaagcaaccatagtacgcgccctgtagcggcgcattaagcgcggcgggtgtggtggttacgcgcagcgtgaccgctacacttgccagcgccctagcgcccgctcctttcgctttcttcccttcctttctcgccacgttcgccggctttccccgtcaagctctaaatcgggggctccctttagggttccgatttagtgctttacggcacctcgaccccaaaaaacttgattagggtgatggttcacgtagtgggccatcgccctgatagacggtttttcgccctttgacgttggagtccacgttctttaatagtggactcttgttccaaactggaacaacactcaaccctatctcggtctattcttttgatttataagggattttgccgatttcggcctattggttaaaaaatgagctgatttaacaaaaatttaacgcgaattttaacaaaatattaacgcttacaatttaaatatttgcttatacaatcttcctgtttttggggcttttctgattatcaaccggggtacatatgattgacatgctagttttacgattaccgttcatcgtctagagctagcatatggatccatcgatttagggataacagggtaattatcagcacacaattgcccattatacgcgcgtataatggactattgtgtgctgatatctgtacacttaagggctagatcttagcttacgtcactagagggtccacgtttagtttttaagatccattgatctcctaaacgctgcaagattcgcaacctggtatacttagcctaggcgctaggtcctagtgcagcgggactttttttctaaagtcgttgagaggaggagtcgtcagaccagatagctttgatgtcctgatcggaaggatcgttggcccccctgcaggcagctgttaattaaccgattcattaatgcagcagctgcgcgctcgctcgctcactgaggccgcccgggcaaagcccgggcgtcgggcgacctttggtcgcccggcctcagtgagcgagcgagcgcgcagagagggagtggcgcgccacgcgtggatctaatagtaatcaattacggggtcattagttcatagcccatatatggagttccgcgttacataacttacggtaaatggcccgcctggctgaccgcccaacgacccccgcccattgacgtcaataatgacgtatgttcccatagtaacgccaatagggactttccattgacgtcaatgggtggagtatttacggtaaactgcccacttggcagtacatcaagtgtatcatatgccaagtccgccccctattgacgtcaatgacggtaaatggcccgcctggcattatgcccagtacatgaccttacgggactttcctacttggcagtacatctacgtattagtcatcgctattaccatggtgatgcggttttggcagtacaccaatgggcgtggatagcggtttgactcacggggatttccaagtctccaccccattgacgtcaatgggagtttgttttggcaccaaaatcaacgggactttccaaaatgtcgtaataaccccgccccgttgacgcaaatgggcggtaggcgtgtacggtgggaggtctatataagcagagctcgtttagtgaaccgtcagatcactagaagctttattgcggtagtttatcacagttaaattgctaacgcagtcagtgcttctgacacaacagtctcgaacttaagctgcagaagttggtcgtgaggcactgggcaggtaagtatcaaggttacaagacaggtttaaggagaccaatagaaactgggcttgtcgagacagagaagactcttgcgtttctgataggcacctattggtcttactgacatccactttgcctttctctccacaggtgtccactcccagttcaattacagctcttaaggctagagtacttaatacgactcactataggctagcctctacggtaccgccaccatggaacaggacaacagccccaggaagatccagttcacagtgcccctgctggaaccccacctggaccctgaggctgctgagcagatcaggaggagaaggcctgaccctgccaccctggtgctgaccagtgaccagagcagccctgagattgatgaggacaggatccccaacccccacctgaagagcaccctggcctgataattcgaactgatcacttaccacatttgtagaggttttacttgctttaaaaaacctcccacacctccccctgaacctgaaacataaaatgaatgcaattgttgttgttaacttgtttattgcagcttataatggttacaaataaagcaatagcatcacaaatttcacaaataaagcatttttttcactgcattctagttgtggtttgtccaaactcatcaatgtatcttaaggcgggaattgatctgtttaaacgcggccgcaggaacccctagtgatggagttggccactccctctctgcgcgctcgctcgctcactgaggccgggcgaccaaaggtcgcccgacgcccgggctttgcccgggcggcctcagtgagcgagcgagcgcgcagagagggagtggccaactggcgtaatagcgaagaggttaattaaggcgccctaggccgacccttagactctgtactcagttctataaacgagccattggatacgagatccgtagattgataagggacacggaatatccccggacgcaatagacaccggtggacagcttggtatcctgagcacagtcgcgcgtccgaatctagctctactttagaggccccggattctgatggtcgtagaccgcagaaccgattggggggatgagatctactagttatcagcacacaattgcccattatacgcgcgtataatggactattgtgtgctgatatagggataacagggtaattctagagctagcatatggatccatcgatttattctcttgtttgctccagactctcaggcaatgacctgatagcctttgtagagacctctcaaaaatagctaccctctccggcatgaatttatcagctagaacggttgaatatcatattgatggtgatttgactgtctccggcctttctcacccgtttgaatctttacctacacattactcaggcattgcatttaaaatatatgagggttctaaaaatttttatccttgcgttgaaataaaggcttctcccgcaaaagtattacagggtcataatgtttttggtacaaccgatttagctttatgctctgaggctttattgcttaattttgctaattctttgccttgcctgtatgatttattggatgttggaatcgcctgatgcggtattttctccttacgcatctgtgcggtatttcacaccgcatatggtgcactctcagtacaatctgctctgatgccgcatagttaagccagccccgacacccgccaacacccgctgacgcgccctgacgggcttgtctgctcccggcatccgcttacagacaagctgtgaccgtctccgggagctgcatgtgtcagaggttttcaccgtcatcaccgaaacgcgcgagacgaaagggcctcgtgatacgcctatttttataggttaatgtcatgataataatggtttcttagacgtcagggtaccgggccccccctcgaggtcgacggtatcgataagcttgatatcgaattcctcggggaaatgtgcgcggaacccctatttgtttatttttctaaatacattcaaatatgtatccgctcatgagacaataaccctgataaatgcttcaataatattgaaaaaggaagagtatgagccatattcaacgggaaacgtcgaggccgcgattaaattccaacatggatgctgatttatatgggtataaatgggctcgcgataatgtcgggcaatcaggtgcgacaatctatcgcttgtatgggaagcccgatgcgccagagttgtttctgaaacatggcaaaggtagcgttgccaatgatgttacagatgagatggtcagactaaactggctgacggaatttatgcctcttccgaccatcaagcattttatccgtactcctgatgatgcatggttactcaccactgcgatccccggaaaaacagcattccaggtattagaagaatatcctgattcaggtgaaaatattgttgatgcgctggcagtgttcctgcgccggttgcattcgattcctgtttgtaattgtccttttaacagcgatcgcgtatttcgtctcgctcaggcgcaatcacgaatgaataacggtttggttgatgcgagtgattttgatgacgagcgtaatggctggcctgttgaacaagtctggaaagaaatgcataaacttttgccattctcaccggattcagtcgtcactcatggtgatttctcacttgataaccttatttttgacgaggggaaattaataggttgtattgatgttggacgagtcggaatcgcagaccgataccaggatcttgccatcctatggaactgcctcggtgagttttctccttcattacagaaacggctttttcaaaaatatggtattgataatcctgatatgaataaattgcagtttcatttgatgctcgatgagtttttctaagcgtataatggtctagagctagcatatggatccatcgattccattatacgcctgtcagaccaagtttactcatatatactttagattgatttaaaacttcatttttaatttaaaaggatctaggtgaagatcctttttgataatctcatgaccaaaatcccttaacgtgagttttcgttccactgagcgtcagaccccgtagaaaagatcaaaggatcttcttgagatcctttttttctgcgcgtaatctgctgcttgcaaacaaaaaaaccaccgctaccagcggtggtttgtttgccggatcaagagctaccaactctttttccgaaggtaactggcttcagcagagcgcagataccaaatactgttcttctagtgtagccgtagttaggccaccacttcaagaactctgtagcaccgcctacatacctcgctctgctaatcctgttaccagtggctgctgccagtggcgataagtcgtgtcttaccgggttggactcaagacgatagttaccggataaggcgcagcggtcgggctgaacggggggttcgtgcacacagcccagcttggagcgaacgacctacaccgaactgagatacctacagcgtgagctatgagaaagcgccacgcttcccgaagggagaaaggcggacaggtatccggtaagcggcagggtcggaacaggagagcgcacgagggagcttccagggggaaacgcctggtatctttatagtcctgtcgggtttcgccacctctgacttgagcgtcgatttttgtgatgctcgtcaggggggcggagcctatggaaaaacgccagcaacgcggcctttttacggttcctggcctttttttcctgcagcccgggggatccaagttctagagcccgccaccgcggtggagctcgctcacatgttctttcctgcgttatcccctgattctgtggataaccgtattaccgcctttgagtgagctgataccgctcgccgcagccgaacgaccgagcgcagcgagtcagtgagcgaggaagcggaagagcgcccaatacgcaaaccgcctctccccgcgcgttggccgattcattaatg

SEQ ID NO: 359 - DNA, 6051 bp, Artificial Sequence
  Description of Artificial Sequence: Synthetic polynucleotide
  I-1c.v3 (I-I+B)
cagctggcgtaatagcgaagaggcccgcaccgatcgcccttcccaacagttgcgcagcctgaatggcgaatggcgattccgttgcaatggctggcggtaatattgttctggatattaccagcaaggccgatagtttgagttcttctactcaggcaagtgatgttattactaatcaaagaagtattgcgacaacggttaatttgcgtgatggacagactcttttactcggtggcctcactgattataaaaacacttctcaggattctggcgtaccgttcctgtctaaaatccctttaatcggcctcctgtttagctcccgctctgattctaacgaggaaagcacgttatacgtgctcgtcaaagcaaccatagtacgcgccctgtagcggcgcattaagcgcggcgggtgtggtggttacgcgcagcgtgaccgctacacttgccagcgccctagcgcccgctcctttcgctttcttcccttcctttctcgccacgttcgccggctttccccgtcaagctctaaatcgggggctccctttagggttccgatttagtgctttacggcacctcgaccccaaaaaacttgattagggtgatggttcacgtagtgggccatcgccctgatagacggtttttcgccctttgacgttggagtccacgttctttaatagtggactcttgttccaaactggaacaacactcaaccctatctcggtctattcttttgatttataagggattttgccgatttcggcctattggttaaaaaatgagctgatttaacaaaaatttaacgcgaattttaacaaaatattaacgcttacaatttaaatatttgcttatacaatcttcctgtttttggggcttttctgattatcaaccggggtacatatgattgacatgctagttttacgattaccgttcatcgtctagagctagcatatggatccatcgatttagggataacagggtaattatcagcacacaattgcccattatacgcgcgtataatggactattgtgtgctgatatctgtacacttaagggctagatcttagcttacgtcactagagggtccacgtttagtttttaagatccattgatctcctaaacgctgcaagattcgcaacctggtatacttagcctaggcgctaggtcctagtgcagcgggactttttttctaaagtcgttgagaggaggagtcgtcagaccagatagctttgatgtcctgatcggaaggatcgttggcccccctgcaggcagctgttaattaaccgattcattaatgcagcagctgcgcgctcgctcgctcactgaggccgcccgggcaaagcccgggcgtcgggcgacctttggtcgcccggcctcagtgagcgagcgagcgcgcagagagggagtggcgcgccacgcgtggatctaatagtaatcaattacggggtcattagttcatagcccatatatggagttccgcgttacataacttacggtaaatggcccgcctggctgaccgcccaacgacccccgcccattgacgtcaataatgacgtatgttcccatagtaacgccaatagggactttccattgacgtcaatgggtggagtatttacggtaaactgcccacttggcagtacatcaagtgtatcatatgccaagtccgccccctattgacgtcaatgacggtaaatggcccgcctggcattatgcccagtacatgaccttacgggactttcctacttggcagtacatctacgtattagtcatcgctattaccatggtgatgcggttttggcagtacaccaatgggcgtggatagcggtttgactcacggggatttccaagtctccaccccattgacgtcaatgggagtttgttttggcaccaaaatcaacgggactttccaaaatgtcgtaataaccccgccccgttgacgcaaatgggcggtaggcgtgtacggtgggaggtctatataagcagagctcgtttagtgaaccgtcagatcactagaagctttattgcggtagtttatcacagttaaattgctaacgcagtcagtgcttctgacacaacagtctcgaacttaagctgcagaagttggtcgtgaggcactgggcaggtaagtatcaaggttacaagacaggtttaaggagaccaatagaaactgggcttgtcgagacagagaagactcttgcgtttctgataggcacctattggtcttactgacatccactttgcctttctctccacaggtgtccactcccagttcaattacagctcttaaggctagagtacttaatacgactcactataggctagcctcgacggtaccgccaccatggaacaggacaacagccccaggaagatccagttcacagtgcccctgctggaaccccacctggaccctgaggctgctgagcagatcaggaggagaaggcctgaccctgccaccctggtgctgaccagtgaccagagcagccctgagattgacgaggacaggatccccaacccccacctgaagagcaccctggcctgataattcgaactgatcacttaccacatttgtagaggttttacttgctttaaaaaacctcccacacctccccctgaacctgaaacataaaatgaatgcaattgttgttgttaacttgtttattgcagcttataatggttacaaataaagcaatagcatcacaaatttcacaaataaagcatttttttcactgcattctagttgtggtttgtccaaactcatcaatgtatcttaaggcgggaattgatctgtttaaacgcggccgcaggaacccctagtgatggagttggccactccctctctgcgcgctcgctcgctcactgaggccgggcgaccaaaggtcgcccgacgcccgggctttgcccgggcggcctcagtgagcgagcgagcgcgcagagagggagtggccaactggcgtaatagcgaagaggttaattaaggcgccctaggccgacccttagactctgtactcagttctataaacgagccattggatacgagatccgtagattgataagggacacggaatatccccggacgcaatagacaccggtggacagcttggtatcctgagcacagtcgcgcgtccgaatctagctctactttagaggccccggattctgatggtcgtagaccgcagaaccgattggggggatgagatctactagttatcagcacacaattgcccattatacgcgcgtataatggactattgtgtgctgatatagggataacagggtaattctagagctagcatatggatccatcgatttattctcttgtttgctccagactctcaggcaatgacctgatagcctttgtagagacctctcaaaaatagctaccctctccggcatgaatttatcagctagaacggttgaatatcatattgatggtgatttgactgtctccggcctttctcacccgtttgaatctttacctacacattactcaggcattgcatttaaaatatatgagggttctaaaaatttttatccttgcgttgaaataaaggcttctcccgcaaaagtattacagggtcataatgtttttggtacaaccgatttagctttatgctctgaggctttattgcttaattttgctaattctttgccttgcctgtatgatttattggatgttggaatcgcctgatgcggtattttctccttacgcatctgtgcggtatttcacaccgcatatggtgcactctcagtacaatctgctctgatgccgcatagttaagccagccccgacacccgccaacacccgctgacgcgccctgacgggcttgtctgctcccggcatccgcttacagacaagctgtgaccgtctccgggagctgcatgtgtcagaggttttcaccgtcatcaccgaaacgcgcgagacgaaagggcctcgtgatacgcctatttttataggttaatgtcatgataataatggtttcttagacgtcagggtaccgggccccccctcgaggtcgacggtatcgataagcttgatatcgaattcctcggggaaatgtgcgcggaacccctatttgtttatttttctaaatacattcaaatatgtatccgctcatgagacaataaccctgataaatgcttcaataatattgaaaaaggaagagtatgagccatattcaacgggaaacgtcgaggccgcgattaaattccaacatggatgctgatttatatgggtataaatgggctcgcgataatgtcgggcaatcaggtgcgacaatctatcgcttgtatgggaagcccgatgcgccagagttgtttctgaaacatggcaaaggtagcgttgccaatgatgttacagatgagatggtcagactaaactggctgacggaatttatgcctcttccgaccatcaagcattttatccgtactcctgatgatgcatggttactcaccactgcgatccccggaaaaacagcattccaggtattagaagaatatcctgattcaggtgaaaatattgttgatgcgctggcagtgttcctgcgccggttgcattcgattcctgtttgtaattgtccttttaacagcgatcgcgtatttcgtctcgctcaggcgcaatcacgaatgaataacggtttggttgatgcgagtgattttgatgacgagcgtaatggctggcctgttgaacaagtctggaaagaaatgcataaacttttgccattctcaccggattcagtcgtcactcatggtgatttctcacttgataaccttatttttgacgaggggaaattaataggttgtattgatgttggacgagtcggaatcgcagaccgataccaggatcttgccatcctatggaactgcctcggtgagttttctccttcattacagaaacggctttttcaaaaatatggtattgataatcctgatatgaataaattgcagtttcatttgatgctcgatgagtttttctaagcgtataatggtctagagctagcatatggatccatcgattccattatacgcctgtcagaccaagtttactcatatatactttagattgatttaaaacttcatttttaatttaaaaggatctaggtgaagatcctttttgataatctcatgaccaaaatcccttaacgtgagttttcgttccactgagcgtcagaccccgtagaaaagatcaaaggatcttcttgagatcctttttttctgcgcgtaatctgctgcttgcaaacaaaaaaaccaccgctaccagcggtggtttgtttgccggatcaagagctaccaactctttttccgaaggtaactggcttcagcagagcgcagataccaaatactgttcttctagtgtagccgtagttaggccaccacttcaagaactctgtagcaccgcctacatacctcgctctgctaatcctgttaccagtggctgctgccagtggcgataagtcgtgtcttaccgggttggactcaagacgatagttaccggataaggcgcagcggtcgggctgaacggggggttcgtgcacacagcccagcttggagcgaacgacctacaccgaactgagatacctacagcgtgagctatgagaaagcgccacgcttcccgaagggagaaaggcggacaggtatccggtaagcggcagggtcggaacaggagagcgcacgagggagcttccagggggaaacgcctggtatctttatagtcctgtcgggtttcgccacctctgacttgagcgtcgatttttgtgatgctcgtcaggggggcggagcctatggaaaaacgccagcaacgcggcctttttacggttcctggcctttttttcctgcagcccgggggatccaagttctagagcccgccaccgcggtggagctcgctcacatgttctttcctgcgttatcccctgattctgtggataaccgtattaccgcctttgagtgagctgataccgctcgccgcagccgaacgaccgagcgcagcgagtcagtgagcgaggaagcggaagagcgcccaatacgcaaaccgcctctccccgcgcgttggccgattcattaatg

SEQ ID NO: 360 - DNA, 6051 bp, Artificial Sequence
  Description of Artificial Sequence: Synthetic polynucleotide
  I-1c.v4 (I-I+B)
cagctggcgtaatagcgaagaggcccgcaccgatcgcccttcccaacagttgcgcagcctgaatggcgaatggcgattccgttgcaatggctggcggtaatattgttctggatattaccagcaaggccgatagtttgagttcttctactcaggcaagtgatgttattactaatcaaagaagtattgcgacaacggttaatttgcgtgatggacagactcttttactcggtggcctcactgattataaaaacacttctcaggattctggcgtaccgttcctgtctaaaatccctttaatcggcctcctgtttagctcccgctctgattctaacgaggaaagcacgttatacgtgctcgtcaaagcaaccatagtacgcgccctgtagcggcgcattaagcgcggcgggtgtggtggttacgcgcagcgtgaccgctacacttgccagcgccctagcgcccgctcctttcgctttcttcccttcctttctcgccacgttcgccggctttccccgtcaagctctaaatcgggggctccctttagggttccgatttagtgctttacggcacctcgaccccaaaaaacttgattagggtgatggttcacgtagtgggccatcgccctgatagacggtttttcgccctttgacgttggagtccacgttctttaatagtggactcttgttccaaactggaacaacactcaaccctatctcggtctattcttttgatttataagggattttgccgatttcggcctattggttaaaaaatgagctgatttaacaaaaatttaacgcgaattttaacaaaatattaacgcttacaatttaaatatttgcttatacaatcttcctgtttttggggcttttctgattatcaaccggggtacatatgattgacatgctagttttacgattaccgttcatcgtctagagctagcatatggatccatcgatttagggataacagggtaattatcagcacacaattgcccattatacgcgcgtataatggactattgtgtgctgatatctgtacacttaagggctagatcttagcttacgtcactagagggtccacgtttagtttttaagatccattgatctcctaaacgctgcaagattcgcaacctggtatacttagcctaggcgctaggtcctagtgcagcgggactttttttctaaagtcgttgagaggaggagtcgtcagaccagatagctttgatgtcctgatcggaaggatcgttggcccccctgcaggcagctgttaattaaccgattcattaatgcagcagctgcgcgctcgctcgctcactgaggccgcccgggcaaagcccgggcgtcgggcgacctttggtcgcccggcctcagtgagcgagcgagcgcgcagagagggagtggcgcgccacgcgtggatctaatagtaatcaattacggggtcattagttcatagcccatatatggagttccgcgttacataacttacggtaaatggcccgcctggctgaccgcccaacgacccccgcccattgacgtcaataatgacgtatgttcccatagtaacgccaatagggactttccattgacgtcaatgggtggagtatttacggtaaactgcccacttggcagtacatcaagtgtatcatatgccaagtccgccccctattgacgtcaatgacggtaaatggcccgcctggcattatgcccagtacatgaccttacgggactttcctacttggcagtacatctacgtattagtcatcgctattaccatggtgatgcggttttggcagtacaccaatgggcgtggatagcggtttgactcacggggatttccaagtctccaccccattgacgtcaatgggagtttgttttggcaccaaaatcaacgggactttccaaaatgtcgtaataaccccgccccgttgacgcaaatgggcggtaggcgtgtacggtgggaggtctatataagcagagctcgtttagtgaaccgtcagatcactagaagctttattgcggtagtttatcacagttaaattgctaacgcagtcagtgcttctgacacaacagtctcgaacttaagctgcagaagttggtcgtgaggcactgggcaggtaagtatcaaggttacaagacaggtttaaggagaccaatagaaactgggcttgtcgagacagagaagactcttgcgtttctgataggcacctattggtcttactgacatccactttgcctttctctccacaggtgtccactcccagttcaattacagctcttaaggctagagtacttaatacgactcactataggctagcctctacggtaccgccaccatggaacaggacaacagccccagaaagatccagttcactgtgcccctgctggaaccccacctggacccagaggcagcagagcagatcagaagaagaaggccagacccagccaccctggtgctgacctctgaccagagcagcccagagattgatgaggacagaatccccaacccccacctgaagagcaccctggcctgataattcgaactgatcacttaccacatttgtagaggttttacttgctttaaaaaacctcccacacctccccctgaacctgaaacataaaatgaatgcaattgttgttgttaacttgtttattgcagcttataatggttacaaataaagcaatagcatcacaaatttcacaaataaagcatttttttcactgcattctagttgtggtttgtccaaactcatcaatgtatcttaaggcgggaattgatctgtttaaacgcggccgcaggaacccctagtgatggagttggccactccctctctgcgcgctcgctcgctcactgaggccgggcgaccaaaggtcgcccgacgcccgggctttgcccgggcggcctcagtgagcgagcgagcgcgcagagagggagtggccaactggcgtaatagcgaagaggttaattaaggcgccctaggccgacccttagactctgtactcagttctataaacgagccattggatacgagatccgtagattgataagggacacggaatatccccggacgcaatagacaccggtggacagcttggtatcctgagcacagtcgcgcgtccgaatctagctctactttagaggccccggattctgatggtcgtagaccgcagaaccgattggggggatgagatctactagttatcagcacacaattgcccattatacgcgcgtataatggactattgtgtgctgatatagggataacagggtaattctagagctagcatatggatccatcgatttattctcttgtttgctccagactctcaggcaatgacctgatagcctttgtagagacctctcaaaaatagctaccctctccggcatgaatttatcagctagaacggttgaatatcatattgatggtgatttgactgtctccggcctttctcacccgtttgaatctttacctacacattactcaggcattgcatttaaaatatatgagggttctaaaaatttttatccttgcgttgaaataaaggcttctcccgcaaaagtattacagggtcataatgtttttggtacaaccgatttagctttatgctctgaggctttattgcttaattttgctaattctttgccttgcctgtatgatttattggatgttggaatcgcctgatgcggtattttctccttacgcatctgtgcggtatttcacaccgcatatggtgcactctcagtacaatctgctctgatgccgcatagttaagccagccccgacacccgccaacacccgctgacgcgccctgacgggcttgtctgctcccggcatccgcttacagacaagctgtgaccgtctccgggagctgcatgtgtcagaggttttcaccgtcatcaccgaaacgcgcgagacgaaagggcctcgtgatacgcctatttttataggttaatgtcatgataataatggtttcttagacgtcagggtaccgggccccccctcgaggtcgacggtatcgataagcttgatatcgaattcctcggggaaatgtgcgcggaacccctatttgtttatttttctaaatacattcaaatatgtatccgctcatgagacaataaccctgataaatgcttcaataatattgaaaaaggaagagtatgagccatattcaacgggaaacgtcgaggccgcgattaaattccaacatggatgctgatttatatgggtataaatgggctcgcgataatgtcgggcaatcaggtgcgacaatctatcgcttgtatgggaagcccgatgcgccagagttgtttctgaaacatggcaaaggtagcgttgccaatgatgttacagatgagatggtcagactaaactggctgacggaatttatgcctcttccgaccatcaagcattttatccgtactcctgatgatgcatggttactcaccactgcgatccccggaaaaacagcattccaggtattagaagaatatcctgattcaggtgaaaatattgttgatgcgctggcagtgttcctgcgccggttgcattcgattcctgtttgtaattgtccttttaacagcgatcgcgtatttcgtctcgctcaggcgcaatcacgaatgaataacggtttggttgatgcgagtgattttgatgacgagcgtaatggctggcctgttgaacaagtctggaaagaaatgcataaacttttgccattctcaccggattcagtcgtcactcatggtgatttctcacttgataaccttatttttgacgaggggaaattaataggttgtattgatgttggacgagtcggaatcgcagaccgataccaggatcttgccatcctatggaactgcctcggtgagttttctccttcattacagaaacggctttttcaaaaatatggtattgataatcctgatatgaataaattgcagtttcatttgatgctcgatgagtttttctaagcgtataatggtctagagctagcatatggatccatcgattccattatacgcctgtcagaccaagtttactcatatatactttagattgatttaaaacttcatttttaatttaaaaggatctaggtgaagatcctttttgataatctcatgaccaaaatcccttaacgtgagttttcgttccactgagcgtcagaccccgtagaaaagatcaaaggatcttcttgagatcctttttttctgcgcgtaatctgctgcttgcaaacaaaaaaaccaccgctaccagcggtggtttgtttgccggatcaagagctaccaactctttttccgaaggtaactggcttcagcagagcgcagataccaaatactgttcttctagtgtagccgtagttaggccaccacttcaagaactctgtagcaccgcctacatacctcgctctgctaatcctgttaccagtggctgctgccagtggcgataagtcgtgtcttaccgggttggactcaagacgatagttaccggataaggcgcagcggtcgggctgaacggggggttcgtgcacacagcccagcttggagcgaacgacctacaccgaactgagatacctacagcgtgagctatgagaaagcgccacgcttcccgaagggagaaaggcggacaggtatccggtaagcggcagggtcggaacaggagagcgcacgagggagcttccagggggaaacgcctggtatctttatagtcctgtcgggtttcgccacctctgacttgagcgtcgatttttgtgatgctcgtcaggggggcggagcctatggaaaaacgccagcaacgcggcctttttacggttcctggcctttttttcctgcagcccgggggatccaagttctagagcccgccaccgcggtggagctcgctcacatgttctttcctgcgttatcccctgattctgtggataaccgtattaccgcctttgagtgagctgataccgctcgccgcagccgaacgaccgagcgcagcgagtcagtgagcgaggaagcggaagagcgcccaatacgcaaaccgcctctccccgcgcgttggccgattcattaatg

SEQ ID NO: 361 - DNA, 6492 bp, Artificial Sequence
  Description of Artificial Sequence: Synthetic polynucleotide
  I-1c.v4 (I-I+B)
cagctggcgtaatagcgaagaggcccgcaccgatcgcccttcccaacagttgcgcagcctgaatggcgaatggcgattccgttgcaatggctggcggtaatattgttctggatattaccagcaaggccgatagtttgagttcttctactcaggcaagtgatgttattactaatcaaagaagtattgcgacaacggttaatttgcgtgatggacagactcttttactcggtggcctcactgattataaaaacacttctcaggattctggcgtaccgttcctgtctaaaatccctttaatcggcctcctgtttagctcccgctctgattctaacgaggaaagcacgttatacgtgctcgtcaaagcaaccatagtacgcgccctgtagcggcgcattaagcgcggcgggtgtggtggttacgcgcagcgtgaccgctacacttgccagcgccctagcgcccgctcctttcgctttcttcccttcctttctcgccacgttcgccggctttccccgtcaagctctaaatcgggggctccctttagggttccgatttagtgctttacggcacctcgaccccaaaaaacttgattagggtgatggttcacgtagtgggccatcgccctgatagacggtttttcgccctttgacgttggagtccacgttctttaatagtggactcttgttccaaactggaacaacactcaaccctatctcggtctattcttttgatttataagggattttgccgatttcggcctattggttaaaaaatgagctgatttaacaaaaatttaacgcgaattttaacaaaatattaacgcttacaatttaaatatttgcttatacaatcttcctgtttttggggcttttctgattatcaaccggggtacatatgattgacatgctagttttacgattaccgttcatcgtctagagctagcatatggatccatcgatttagggataacagggtaattatcagcacacaattgcccattatacgcgcgtataatggactattgtgtgctgatatctgtacacttaagggctagatcttagcttacgtcactagagggtccacgtttagtttttaagatccattgatctcctaaacgctgcaagattcgcaacctggtatacttagcctaggcgctaggtcctagtgcagcgggactttttttctaaagtcgttgagaggaggagtcgtcagaccagatagctttgatgtcctgatcggaaggatcgttggcccccctgcaggcagctgttaattaaccgattcattaatgcagcagctgcgcgctcgctcgctcactgaggccgcccgggcaaagcccgggcgtcgggcgacctttggtcgcccggcctcagtgagcgagcgagcgcgcagagagggagtggcgcgccacgcgtggatctaatagtaatcaattacggggtcattagttcatagcccatatatggagttccgcgttacataacttacggtaaatggcccgcctggctgaccgcccaacgacccccgcccattgacgtcaataatgacgtatgttcccatagtaacgccaatagggactttccattgacgtcaatgggtggagtatttacggtaaactgcccacttggcagtacatcaagtgtatcatatgccaagtccgccccctattgacgtcaatgacggtaaatggcccgcctggcattatgcccagtacatgaccttacgggactttcctacttggcagtacatctacgtattagtcatcgctattaccatggtgatgcggttttggcagtacaccaatgggcgtggatagcggtttgactcacggggatttccaagtctccaccccattgacgtcaatgggagtttgttttggcaccaaaatcaacgggactttccaaaatgtcgtaataaccccgccccgttgacgcaaatgggcggtaggcgtgtacggtgggaggtctatataagcagagctcgtttagtgaaccgtcagatcactagaagctttattgcggtagtttatcacagttaaattgctaacgcagtcagtgcttctgacacaacagtctcgaacttaagctgcagaagttggtcgtgaggcactgggcaggtaagtatcaaggttacaagacaggtttaaggagaccaatagaaactgggcttgtcgagacagagaagactcttgcgtttctgataggcacctattggtcttactgacatccactttgcctttctctccacaggtgtccactcccagttcaattacagctcttaaggctagagtacttaatacgactcactataggctagcctcgacggtaccgccaccatggaacaggacaacagcccccggaagatccagttcaccgtgcccctgctggaaccccacctggaccccgaggccgccgagcagatccggcggagaaggcccgaccccgccaccctggtgctgaccagcgaccagagcagccccgagatcgacgaggaccggatccccaacccccacctgaagagcaccctggcctgatgattcgaactgatcacttttttaataaaaggggcatttggaaaaaaaaaaaaaaggtagcagtcgacagatgaattctgcagatctgtggcttctagctgcccgggtggcatccctgtgacccctccccagtgcctctcctggccctggaagttgccactccagtgcccaccagccttgtcctaataaaattaagttgcatcattttgtctgactaggtgtccttctataatattatggggtggaggggggtggtatggagcaaggggcaagttgggaagacaacctgtagggcctgcggggtctattgggaaccaagctggagtgcagtggcacaatcttggctcactgcaatctccgcctcctgggttcaagcgattctcctgcctcagcctcccgagttgttgggattccaggcatgcatgaccaggctcagctaatttttgtttttttggtagagacggggtttcaccatattggccaggctggtctccaactcctaatctcaggtgatctacccaccttggcctcccaaattgctgggattacaggcgtgaaccactgctcccttccctgtccttctgattttaaaaaaaagagaaatgttctggcacctgcacttgcactggggacagcctattttgctagtttgttttgtttcgttttgttttgatggagagcgtatgttgtttaaacgcggccgcaggaacccctagtgatggagttggccactccctctctgcgcgctcgctcgctcactgaggccgggcgaccaaaggtcgcccgacgcccgggctttgcccgggcggcctcagtgagcgagcgagcgcgcagagagggagtggccaactggcgtaatagcgaagaggttaattaaggcgccctaggccgacccttagactctgtactcagttctataaacgagccattggatacgagatccgtagattgataagggacacggaatatccccggacgcaatagacaccggtggacagcttggtatcctgagcacagtcgcgcgtccgaatctagctctactttagaggccccggattctgatggtcgtagaccgcagaaccgattggggggatgagatctactagttatcagcacacaattgcccattatacgcgcgtataatggactattgtgtgctgatatagggataacagggtaattctagagctagcatatggatccatcgatttattctcttgtttgctccagactctcaggcaatgacctgatagcctttgtagagacctctcaaaaatagctaccctctccggcatgaatttatcagctagaacggttgaatatcatattgatggtgatttgactgtctccggcctttctcacccgtttgaatctttacctacacattactcaggcattgcatttaaaatatatgagggttctaaaaatttttatccttgcgttgaaataaaggcttctcccgcaaaagtattacagggtcataatgtttttggtacaaccgatttagctttatgctctgaggctttattgcttaattttgctaattctttgccttgcctgtatgatttattggatgttggaatcgcctgatgcggtattttctccttacgcatctgtgcggtatttcacaccgcatatggtgcactctcagtacaatctgctctgatgccgcatagttaagccagccccgacacccgccaacacccgctgacgcgccctgacgggcttgtctgctcccggcatccgcttacagacaagctgtgaccgtctccgggagctgcatgtgtcagaggttttcaccgtcatcaccgaaacgcgcgagacgaaagggcctcgtgatacgcctatttttataggttaatgtcatgataataatggtttcttagacgtcagggtaccgggccccccctcgaggtcgacggtatcgataagcttgatatcgaattcctcggggaaatgtgcgcggaacccctatttgtttatttttctaaatacattcaaatatgtatccgctcatgagacaataaccctgataaatgcttcaataatattgaaaaaggaagagtatgagccatattcaacgggaaacgtcgaggccgcgattaaattccaacatggatgctgatttatatgggtataaatgggctcgcgataatgtcgggcaatcaggtgcgacaatctatcgcttgtatgggaagcccgatgcgccagagttgtttctgaaacatggcaaaggtagcgttgccaatgatgttacagatgagatggtcagactaaactggctgacggaatttatgcctcttccgaccatcaagcattttatccgtactcctgatgatgcatggttactcaccactgcgatccccggaaaaacagcattccaggtattagaagaatatcctgattcaggtgaaaatattgttgatgcgctggcagtgttcctgcgccggttgcattcgattcctgtttgtaattgtccttttaacagcgatcgcgtatttcgtctcgctcaggcgcaatcacgaatgaataacggtttggttgatgcgagtgattttgatgacgagcgtaatggctggcctgttgaacaagtctggaaagaaatgcataaacttttgccattctcaccggattcagtcgtcactcatggtgatttctcacttgataaccttatttttgacgaggggaaattaataggttgtattgatgttggacgagtcggaatcgcagaccgataccaggatcttgccatcctatggaactgcctcggtgagttttctccttcattacagaaacggctttttcaaaaatatggtattgataatcctgatatgaataaattgcagtttcatttgatgctcgatgagtttttctaagcgtataatggtctagagctagcatatggatccatcgattccattatacgcctgtcagaccaagtttactcatatatactttagattgatttaaaacttcatttttaatttaaaaggatctaggtgaagatcctttttgataatctcatgaccaaaatcccttaacgtgagttttcgttccactgagcgtcagaccccgtagaaaagatcaaaggatcttcttgagatcctttttttctgcgcgtaatctgctgcttgcaaacaaaaaaaccaccgctaccagcggtggtttgtttgccggatcaagagctaccaactctttttccgaaggtaactggcttcagcagagcgcagataccaaatactgttcttctagtgtagccgtagttaggccaccacttcaagaactctgtagcaccgcctacatacctcgctctgctaatcctgttaccagtggctgctgccagtggcgataagtcgtgtcttaccgggttggactcaagacgatagttaccggataaggcgcagcggtcgggctgaacggggggttcgtgcacacagcccagcttggagcgaacgacctacaccgaactgagatacctacagcgtgagctatgagaaagcgccacgcttcccgaagggagaaaggcggacaggtatccggtaagcggcagggtcggaacaggagagcgcacgagggagcttccagggggaaacgcctggtatctttatagtcctgtcgggtttcgccacctctgacttgagcgtcgatttttgtgatgctcgtcaggggggcggagcctatggaaaaacgccagcaacgcggcctttttacggttcctggcctttttttcctgcagcccgggggatccaagttctagagcccgccaccgcggtggagctcgctcacatgttctttcctgcgttatcccctgattctgtggataaccgtattaccgcctttgagtgagctgataccgctcgccgcagccgaacgaccgagcgcagcgagtcagtgagcgaggaagcggaagagcgcccaatacgcaaaccgcctctccccgcgcgttggccgattcattaatg

SEQ ID NO: 362 - DNA, 6492 bp, Artificial Sequence
  Description of Artificial Sequence: Synthetic polynucleotide
  I-1c.v5 (I-I+B)
cagctggcgtaatagcgaagaggcccgcaccgatcgcccttcccaacagttgcgcagcctgaatggcgaatggcgattccgttgcaatggctggcggtaatattgttctggatattaccagcaaggccgatagtttgagttcttctactcaggcaagtgatgttattactaatcaaagaagtattgcgacaacggttaatttgcgtgatggacagactcttttactcggtggcctcactgattataaaaacacttctcaggattctggcgtaccgttcctgtctaaaatccctttaatcggcctcctgtttagctcccgctctgattctaacgaggaaagcacgttatacgtgctcgtcaaagcaaccatagtacgcgccctgtagcggcgcattaagcgcggcgggtgtggtggttacgcgcagcgtgaccgctacacttgccagcgccctagcgcccgctcctttcgctttcttcccttcctttctcgccacgttcgccggctttccccgtcaagctctaaatcgggggctccctttagggttccgatttagtgctttacggcacctcgaccccaaaaaacttgattagggtgatggttcacgtagtgggccatcgccctgatagacggtttttcgccctttgacgttggagtccacgttctttaatagtggactcttgttccaaactggaacaacactcaaccctatctcggtctattcttttgatttataagggattttgccgatttcggcctattggttaaaaaatgagctgatttaacaaaaatttaacgcgaattttaacaaaatattaacgcttacaatttaaatatttgcttatacaatcttcctgtttttggggcttttctgattatcaaccggggtacatatgattgacatgctagttttacgattaccgttcatcgtctagagctagcatatggatccatcgatttagggataacagggtaattatcagcacacaattgcccattatacgcgcgtataatggactattgtgtgctgatatctgtacacttaagggctagatcttagcttacgtcactagagggtccacgtttagtttttaagatccattgatctcctaaacgctgcaagattcgcaacctggtatacttagcctaggcgctaggtcctagtgcagcgggactttttttctaaagtcgttgagaggaggagtcgtcagaccagatagctttgatgtcctgatcggaaggatcgttggcccccctgcaggcagctgttaattaaccgattcattaatgcagcagctgcgcgctcgctcgctcactgaggccgcccgggcaaagcccgggcgtcgggcgacctttggtcgcccggcctcagtgagcgagcgagcgcgcagagagggagtggcgcgccacgcgtggatctaatagtaatcaattacggggtcattagttcatagcccatatatggagttccgcgttacataacttacggtaaatggcccgcctggctgaccgcccaacgacccccgcccattgacgtcaataatgacgtatgttcccatagtaacgccaatagggactttccattgacgtcaatgggtggagtatttacggtaaactgcccacttggcagtacatcaagtgtatcatatgccaagtccgccccctattgacgtcaatgacggtaaatggcccgcctggcattatgcccagtacatgaccttacgggactttcctacttggcagtacatctacgtattagtcatcgctattaccatggtgatgcggttttggcagtacaccaatgggcgtggatagcggtttgactcacggggatttccaagtctccaccccattgacgtcaatgggagtttgttttggcaccaaaatcaacgggactttccaaaatgtcgtaataaccccgccccgttgacgcaaatgggcggtaggcgtgtacggtgggaggtctatataagcagagctcgtttagtgaaccgtcagatcactagaagctttattgcggtagtttatcacagttaaattgctaacgcagtcagtgcttctgacacaacagtctcgaacttaagctgcagaagttggtcgtgaggcactgggcaggtaagtatcaaggttacaagacaggtttaaggagaccaatagaaactgggcttgtcgagacagagaagactcttgcgtttctgataggcacctattggtcttactgacatccactttgcctttctctccacaggtgtccactcccagttcaattacagctcttaaggctagagtacttaatacgactcactataggctagcctctacggtaccgccaccatggaacaggacaacagccccaggaagatccagttcacagtgcccctgctggaaccccacctggaccctgaggctgctgagcagatcaggaggagaaggcctgaccctgccaccctggtgctgaccagtgaccagagcagccctgagattgatgaggacaggatccccaacccccacctgaagagcaccctggcctgataattcgaactgatcacttttttaataaaaggggcatttggaaaaaaaaaaaaaaggtagcagtcgacagatgaattctgcagatctgtggcttctagctgcccgggtggcatccctgtgacccctccccagtgcctctcctggccctggaagttgccactccagtgcccaccagccttgtcctaataaaattaagttgcatcattttgtctgactaggtgtccttctataatattatggggtggaggggggtggtatggagcaaggggcaagttgggaagacaacctgtagggcctgcggggtctattgggaaccaagctggagtgcagtggcacaatcttggctcactgcaatctccgcctcctgggttcaagcgattctcctgcctcagcctcccgagttgttgggattccaggcatgcatgaccaggctcagctaatttttgtttttttggtagagacggggtttcaccatattggccaggctggtctccaactcctaatctcaggtgatctacccaccttggcctcccaaattgctgggattacaggcgtgaaccactgctcccttccctgtccttctgattttaaaaaaaagagaaatgttctggcacctgcacttgcactggggacagcctattttgctagtttgttttgtttcgttttgttttgatggagagcgtatgttgtttaaacgcggccgcaggaacccctagtgatggagttggccactccctctctgcgcgctcgctcgctcactgaggccgggcgaccaaaggtcgcccgacgcccgggctttgcccgggcggcctcagtgagcgagcgagcgcgcagagagggagtggccaactggcgtaatagcgaagaggttaattaaggcgccctaggccgacccttagactctgtactcagttctataaacgagccattggatacgagatccgtagattgataagggacacggaatatccccggacgcaatagacaccggtggacagcttggtatcctgagcacagtcgcgcgtccgaatctagctctactttagaggccccggattctgatggtcgtagaccgcagaaccgattggggggatgagatctactagttatcagcacacaattgcccattatacgcgcgtataatggactattgtgtgctgatatagggataacagggtaattctagagctagcatatggatccatcgatttattctcttgtttgctccagactctcaggcaatgacctgatagcctttgtagagacctctcaaaaatagctaccctctccggcatgaatttatcagctagaacggttgaatatcatattgatggtgatttgactgtctccggcctttctcacccgtttgaatctttacctacacattactcaggcattgcatttaaaatatatgagggttctaaaaatttttatccttgcgttgaaataaaggcttctcccgcaaaagtattacagggtcataatgtttttggtacaaccgatttagctttatgctctgaggctttattgcttaattttgctaattctttgccttgcctgtatgatttattggatgttggaatcgcctgatgcggtattttctccttacgcatctgtgcggtatttcacaccgcatatggtgcactctcagtacaatctgctctgatgccgcatagttaagccagccccgacacccgccaacacccgctgacgcgccctgacgggcttgtctgctcccggcatccgcttacagacaagctgtgaccgtctccgggagctgcatgtgtcagaggttttcaccgtcatcaccgaaacgcgcgagacgaaagggcctcgtgatacgcctatttttataggttaatgtcatgataataatggtttcttagacgtcagggtaccgggccccccctcgaggtcgacggtatcgataagcttgatatcgaattcctcggggaaatgtgcgcggaacccctatttgtttatttttctaaatacattcaaatatgtatccgctcatgagacaataaccctgataaatgcttcaataatattgaaaaaggaagagtatgagccatattcaacgggaaacgtcgaggccgcgattaaattccaacatggatgctgatttatatgggtataaatgggctcgcgataatgtcgggcaatcaggtgcgacaatctatcgcttgtatgggaagcccgatgcgccagagttgtttctgaaacatggcaaaggtagcgttgccaatgatgttacagatgagatggtcagactaaactggctgacggaatttatgcctcttccgaccatcaagcattttatccgtactcctgatgatgcatggttactcaccactgcgatccccggaaaaacagcattccaggtattagaagaatatcctgattcaggtgaaaatattgttgatgcgctggcagtgttcctgcgccggttgcattcgattcctgtttgtaattgtccttttaacagcgatcgcgtatttcgtctcgctcaggcgcaatcacgaatgaataacggtttggttgatgcgagtgattttgatgacgagcgtaatggctggcctgttgaacaagtctggaaagaaatgcataaacttttgccattctcaccggattcagtcgtcactcatggtgatttctcacttgataaccttatttttgacgaggggaaattaataggttgtattgatgttggacgagtcggaatcgcagaccgataccaggatcttgccatcctatggaactgcctcggtgagttttctccttcattacagaaacggctttttcaaaaatatggtattgataatcctgatatgaataaattgcagtttcatttgatgctcgatgagtttttctaagcgtataatggtctagagctagcatatggatccatcgattccattatacgcctgtcagaccaagtttactcatatatactttagattgatttaaaacttcatttttaatttaaaaggatctaggtgaagatcctttttgataatctcatgaccaaaatcccttaacgtgagttttcgttccactgagcgtcagaccccgtagaaaagatcaaaggatcttcttgagatcctttttttctgcgcgtaatctgctgcttgcaaacaaaaaaaccaccgctaccagcggtggtttgtttgccggatcaagagctaccaactctttttccgaaggtaactggcttcagcagagcgcagataccaaatactgttcttctagtgtagccgtagttaggccaccacttcaagaactctgtagcaccgcctacatacctcgctctgctaatcctgttaccagtggctgctgccagtggcgataagtcgtgtcttaccgggttggactcaagacgatagttaccggataaggcgcagcggtcgggctgaacggggggttcgtgcacacagcccagcttggagcgaacgacctacaccgaactgagatacctacagcgtgagctatgagaaagcgccacgcttcccgaagggagaaaggcggacaggtatccggtaagcggcagggtcggaacaggagagcgcacgagggagcttccagggggaaacgcctggtatctttatagtcctgtcgggtttcgccacctctgacttgagcgtcgatttttgtgatgctcgtcaggggggcggagcctatggaaaaacgccagcaacgcggcctttttacggttcctggcctttttttcctgcagcccgggggatccaagttctagagcccgccaccgcggtggagctcgctcacatgttctttcctgcgttatcccctgattctgtggataaccgtattaccgcctttgagtgagctgataccgctcgccgcagccgaacgaccgagcgcagcgagtcagtgagcgaggaagcggaagagcgcccaatacgcaaaccgcctctccccgcgcgttggccgattcattaatg

SEQ ID NO: 363 - DNA, 6492 bp, Artificial Sequence
  Description of Artificial Sequence: Synthetic polynucleotide
  I-1c.v7 (I-I+B)
cagctggcgtaatagcgaagaggcccgcaccgatcgcccttcccaacagttgcgcagcctgaatggcgaatggcgattccgttgcaatggctggcggtaatattgttctggatattaccagcaaggccgatagtttgagttcttctactcaggcaagtgatgttattactaatcaaagaagtattgcgacaacggttaatttgcgtgatggacagactcttttactcggtggcctcactgattataaaaacacttctcaggattctggcgtaccgttcctgtctaaaatccctttaatcggcctcctgtttagctcccgctctgattctaacgaggaaagcacgttatacgtgctcgtcaaagcaaccatagtacgcgccctgtagcggcgcattaagcgcggcgggtgtggtggttacgcgcagcgtgaccgctacacttgccagcgccctagcgcccgctcctttcgctttcttcccttcctttctcgccacgttcgccggctttccccgtcaagctctaaatcgggggctccctttagggttccgatttagtgctttacggcacctcgaccccaaaaaacttgattagggtgatggttcacgtagtgggccatcgccctgatagacggtttttcgccctttgacgttggagtccacgttctttaatagtggactcttgttccaaactggaacaacactcaaccctatctcggtctattcttttgatttataagggattttgccgatttcggcctattggttaaaaaatgagctgatttaacaaaaatttaacgcgaattttaacaaaatattaacgcttacaatttaaatatttgcttatacaatcttcctgtttttggggcttttctgattatcaaccggggtacatatgattgacatgctagttttacgattaccgttcatcgtctagagctagcatatggatccatcgatttagggataacagggtaattatcagcacacaattgcccattatacgcgcgtataatggactattgtgtgctgatatctgtacacttaagggctagatcttagcttacgtcactagagggtccacgtttagtttttaagatccattgatctcctaaacgctgcaagattcgcaacctggtatacttagcctaggcgctaggtcctagtgcagcgggactttttttctaaagtcgttgagaggaggagtcgtcagaccagatagctttgatgtcctgatcggaaggatcgttggcccccctgcaggcagctgttaattaaccgattcattaatgcagcagctgcgcgctcgctcgctcactgaggccgcccgggcaaagcccgggcgtcgggcgacctttggtcgcccggcctcagtgagcgagcgagcgcgcagagagggagtggcgcgccacgcgtggatctaatagtaatcaattacggggtcattagttcatagcccatatatggagttccgcgttacataacttacggtaaatggcccgcctggctgaccgcccaacgacccccgcccattgacgtcaataatgacgtatgttcccatagtaacgccaatagggactttccattgacgtcaatgggtggagtatttacggtaaactgcccacttggcagtacatcaagtgtatcatatgccaagtccgccccctattgacgtcaatgacggtaaatggcccgcctggcattatgcccagtacatgaccttacgggactttcctacttggcagtacatctacgtattagtcatcgctattaccatggtgatgcggttttggcagtacaccaatgggcgtggatagcggtttgactcacggggatttccaagtctccaccccattgacgtcaatgggagtttgttttggcaccaaaatcaacgggactttccaaaatgtcgtaataaccccgccccgttgacgcaaatgggcggtaggcgtgtacggtgggaggtctatataagcagagctcgtttagtgaaccgtcagatcactagaagctttattgcggtagtttatcacagttaaattgctaacgcagtcagtgcttctgacacaacagtctcgaacttaagctgcagaagttggtcgtgaggcactgggcaggtaagtatcaaggttacaagacaggtttaaggagaccaatagaaactgggcttgtcgagacagagaagactcttgcgtttctgataggcacctattggtcttactgacatccactttgcctttctctccacaggtgtccactcccagttcaattacagctcttaaggctagagtacttaatacgactcactataggctagcctcgacggtaccgccaccatggaacaggacaacagccccaggaagatccagttcacagtgcccctgctggaaccccacctggaccctgaggctgctgagcagatcaggaggagaaggcctgaccctgccaccctggtgctgaccagtgaccagagcagccctgagattgacgaggacaggatccccaacccccacctgaagagcaccctggcctgataattcgaactgatcacttttttaataaaaggggcatttggaaaaaaaaaaaaaaggtagcagtcgacagatgaattctgcagatctgtggcttctagctgcccgggtggcatccctgtgacccctccccagtgcctctcctggccctggaagttgccactccagtgcccaccagccttgtcctaataaaattaagttgcatcattttgtctgactaggtgtccttctataatattatggggtggaggggggtggtatggagcaaggggcaagttgggaagacaacctgtagggcctgcggggtctattgggaaccaagctggagtgcagtggcacaatcttggctcactgcaatctccgcctcctgggttcaagcgattctcctgcctcagcctcccgagttgttgggattccaggcatgcatgaccaggctcagctaatttttgtttttttggtagagacggggtttcaccatattggccaggctggtctccaactcctaatctcaggtgatctacccaccttggcctcccaaattgctgggattacaggcgtgaaccactgctcccttccctgtccttctgattttaaaaaaaagagaaatgttctggcacctgcacttgcactggggacagcctattttgctagtttgttttgtttcgttttgttttgatggagagcgtatgttgtttaaacgcggccgcaggaacccctagtgatggagttggccactccctctctgcgcgctcgctcgctcactgaggccgggcgaccaaaggtcgcccgacgcccgggctttgcccgggcggcctcagtgagcgagcgagcgcgcagagagggagtggccaactggcgtaatagcgaagaggttaattaaggcgccctaggccgacccttagactctgtactcagttctataaacgagccattggatacgagatccgtagattgataagggacacggaatatccccggacgcaatagacaccggtggacagcttggtatcctgagcacagtcgcgcgtccgaatctagctctactttagaggccccggattctgatggtcgtagaccgcagaaccgattggggggatgagatctactagttatcagcacacaattgcccattatacgcgcgtataatggactattgtgtgctgatatagggataacagggtaattctagagctagcatatggatccatcgatttattctcttgtttgctccagactctcaggcaatgacctgatagcctttgtagagacctctcaaaaatagctaccctctccggcatgaatttatcagctagaacggttgaatatcatattgatggtgatttgactgtctccggcctttctcacccgtttgaatctttacctacacattactcaggcattgcatttaaaatatatgagggttctaaaaatttttatccttgcgttgaaataaaggcttctcccgcaaaagtattacagggtcataatgtttttggtacaaccgatttagctttatgctctgaggctttattgcttaattttgctaattctttgccttgcctgtatgatttattggatgttggaatcgcctgatgcggtattttctccttacgcatctgtgcggtatttcacaccgcatatggtgcactctcagtacaatctgctctgatgccgcatagttaagccagccccgacacccgccaacacccgctgacgcgccctgacgggcttgtctgctcccggcatccgcttacagacaagctgtgaccgtctccgggagctgcatgtgtcagaggttttcaccgtcatcaccgaaacgcgcgagacgaaagggcctcgtgatacgcctatttttataggttaatgtcatgataataatggtttcttagacgtcagggtaccgggccccccctcgaggtcgacggtatcgataagcttgatatcgaattcctcggggaaatgtgcgcggaacccctatttgtttatttttctaaatacattcaaatatgtatccgctcatgagacaataaccctgataaatgcttcaataatattgaaaaaggaagagtatgagccatattcaacgggaaacgtcgaggccgcgattaaattccaacatggatgctgatttatatgggtataaatgggctcgcgataatgtcgggcaatcaggtgcgacaatctatcgcttgtatgggaagcccgatgcgccagagttgtttctgaaacatggcaaaggtagcgttgccaatgatgttacagatgagatggtcagactaaactggctgacggaatttatgcctcttccgaccatcaagcattttatccgtactcctgatgatgcatggttactcaccactgcgatccccggaaaaacagcattccaggtattagaagaatatcctgattcaggtgaaaatattgttgatgcgctggcagtgttcctgcgccggttgcattcgattcctgtttgtaattgtccttttaacagcgatcgcgtatttcgtctcgctcaggcgcaatcacgaatgaataacggtttggttgatgcgagtgattttgatgacgagcgtaatggctggcctgttgaacaagtctggaaagaaatgcataaacttttgccattctcaccggattcagtcgtcactcatggtgatttctcacttgataaccttatttttgacgaggggaaattaataggttgtattgatgttggacgagtcggaatcgcagaccgataccaggatcttgccatcctatggaactgcctcggtgagttttctccttcattacagaaacggctttttcaaaaatatggtattgataatcctgatatgaataaattgcagtttcatttgatgctcgatgagtttttctaagcgtataatggtctagagctagcatatggatccatcgattccattatacgcctgtcagaccaagtttactcatatatactttagattgatttaaaacttcatttttaatttaaaaggatctaggtgaagatcctttttgataatctcatgaccaaaatcccttaacgtgagttttcgttccactgagcgtcagaccccgtagaaaagatcaaaggatcttcttgagatcctttttttctgcgcgtaatctgctgcttgcaaacaaaaaaaccaccgctaccagcggtggtttgtttgccggatcaagagctaccaactctttttccgaaggtaactggcttcagcagagcgcagataccaaatactgttcttctagtgtagccgtagttaggccaccacttcaagaactctgtagcaccgcctacatacctcgctctgctaatcctgttaccagtggctgctgccagtggcgataagtcgtgtcttaccgggttggactcaagacgatagttaccggataaggcgcagcggtcgggctgaacggggggttcgtgcacacagcccagcttggagcgaacgacctacaccgaactgagatacctacagcgtgagctatgagaaagcgccacgcttcccgaagggagaaaggcggacaggtatccggtaagcggcagggtcggaacaggagagcgcacgagggagcttccagggggaaacgcctggtatctttatagtcctgtcgggtttcgccacctctgacttgagcgtcgatttttgtgatgctcgtcaggggggcggagcctatggaaaaacgccagcaacgcggcctttttacggttcctggcctttttttcctgcagcccgggggatccaagttctagagcccgccaccgcggtggagctcgctcacatgttctttcctgcgttatcccctgattctgtggataaccgtattaccgcctttgagtgagctgataccgctcgccgcagccgaacgaccgagcgcagcgagtcagtgagcgaggaagcggaagagcgcccaatacgcaaaccgcctctccccgcgcgttggccgattcattaatg

SEQ ID NO: 364 - DNA, 6492 bp, Artificial Sequence
  Description of Artificial Sequence: Synthetic polynucleotide
  I-1c.v8 (I-I+B)
cagctggcgtaatagcgaagaggcccgcaccgatcgcccttcccaacagttgcgcagcctgaatggcgaatggcgattccgttgcaatggctggcggtaatattgttctggatattaccagcaaggccgatagtttgagttcttctactcaggcaagtgatgttattactaatcaaagaagtattgcgacaacggttaatttgcgtgatggacagactcttttactcggtggcctcactgattataaaaacacttctcaggattctggcgtaccgttcctgtctaaaatccctttaatcggcctcctgtttagctcccgctctgattctaacgaggaaagcacgttatacgtgctcgtcaaagcaaccatagtacgcgccctgtagcggcgcattaagcgcggcgggtgtggtggttacgcgcagcgtgaccgctacacttgccagcgccctagcgcccgctcctttcgctttcttcccttcctttctcgccacgttcgccggctttccccgtcaagctctaaatcgggggctccctttagggttccgatttagtgctttacggcacctcgaccccaaaaaacttgattagggtgatggttcacgtagtgggccatcgccctgatagacggtttttcgccctttgacgttggagtccacgttctttaatagtggactcttgttccaaactggaacaacactcaaccctatctcggtctattcttttgatttataagggattttgccgatttcggcctattggttaaaaaatgagctgatttaacaaaaatttaacgcgaattttaacaaaatattaacgcttacaatttaaatatttgcttatacaatcttcctgtttttggggcttttctgattatcaaccggggtacatatgattgacatgctagttttacgattaccgttcatcgtctagagctagcatatggatccatcgatttagggataacagggtaattatcagcacacaattgcccattatacgcgcgtataatggactattgtgtgctgatatctgtacacttaagggctagatcttagcttacgtcactagagggtccacgtttagtttttaagatccattgatctcctaaacgctgcaagattcgcaacctggtatacttagcctaggcgctaggtcctagtgcagcgggactttttttctaaagtcgttgagaggaggagtcgtcagaccagatagctttgatgtcctgatcggaaggatcgttggcccccctgcaggcagctgttaattaaccgattcattaatgcagcagctgcgcgctcgctcgctcactgaggccgcccgggcaaagcccgggcgtcgggcgacctttggtcgcccggcctcagtgagcgagcgagcgcgcagagagggagtggcgcgccacgcgtggatctaatagtaatcaattacggggtcattagttcatagcccatatatggagttccgcgttacataacttacggtaaatggcccgcctggctgaccgcccaacgacccccgcccattgacgtcaataatgacgtatgttcccatagtaacgccaatagggactttccattgacgtcaatgggtggagtatttacggtaaactgcccacttggcagtacatcaagtgtatcatatgccaagtccgccccctattgacgtcaatgacggtaaatggcccgcctggcattatgcccagtacatgaccttacgggactttcctacttggcagtacatctacgtattagtcatcgctattaccatggtgatgcggttttggcagtacaccaatgggcgtggatagcggtttgactcacggggatttccaagtctccaccccattgacgtcaatgggagtttgttttggcaccaaaatcaacgggactttccaaaatgtcgtaataaccccgccccgttgacgcaaatgggcggtaggcgtgtacggtgggaggtctatataagcagagctcgtttagtgaaccgtcagatcactagaagctttattgcggtagtttatcacagttaaattgctaacgcagtcagtgcttctgacacaacagtctcgaacttaagctgcagaagttggtcgtgaggcactgggcaggtaagtatcaaggttacaagacaggtttaaggagaccaatagaaactgggcttgtcgagacagagaagactcttgcgtttctgataggcacctattggtcttactgacatccactttgcctttctctccacaggtgtccactcccagttcaattacagctcttaaggctagagtacttaatacgactcactataggctagcctctacggtaccgccaccatggaacaggacaacagccccagaaagatccagttcactgtgcccctgctggaaccccacctggacccagaggcagcagagcagatcagaagaagaaggccagacccagccaccctggtgctgacctctgaccagagcagcccagagattgatgaggacagaatccccaacccccacctgaagagcaccctggcctgataattcgaactgatcacttttttaataaaaggggcatttggaaaaaaaaaaaaaaggtagcagtcgacagatgaattctgcagatctgtggcttctagctgcccgggtggcatccctgtgacccctccccagtgcctctcctggccctggaagttgccactccagtgcccaccagccttgtcctaataaaattaagttgcatcattttgtctgactaggtgtccttctataatattatggggtggaggggggtggtatggagcaaggggcaagttgggaagacaacctgtagggcctgcggggtctattgggaaccaagctggagtgcagtggcacaatcttggctcactgcaatctccgcctcctgggttcaagcgattctcctgcctcagcctcccgagttgttgggattccaggcatgcatgaccaggctcagctaatttttgtttttttggtagagacggggtttcaccatattggccaggctggtctccaactcctaatctcaggtgatctacccaccttggcctcccaaattgctgggattacaggcgtgaaccactgctcccttccctgtccttctgattttaaaaaaaagagaaatgttctggcacctgcacttgcactggggacagcctattttgctagtttgttttgtttcgttttgttttgatggagagcgtatgttgtttaaacgcggccgcaggaacccctagtgatggagttggccactccctctctgcgcgctcgctcgctcactgaggccgggcgaccaaaggtcgcccgacgcccgggctttgcccgggcggcctcagtgagcgagcgagcgcgcagagagggagtggccaactggcgtaatagcgaagaggttaattaaggcgccctaggccgacccttagactctgtactcagttctataaacgagccattggatacgagatccgtagattgataagggacacggaatatccccggacgcaatagacaccggtggacagcttggtatcctgagcacagtcgcgcgtccgaatctagctctactttagaggccccggattctgatggtcgtagaccgcagaaccgattggggggatgagatctactagttatcagcacacaattgcccattatacgcgcgtataatggactattgtgtgctgatatagggataacagggtaattctagagctagcatatggatccatcgatttattctcttgtttgctccagactctcaggcaatgacctgatagcctttgtagagacctctcaaaaatagctaccctctccggcatgaatttatcagctagaacggttgaatatcatattgatggtgatttgactgtctccggcctttctcacccgtttgaatctttacctacacattactcaggcattgcatttaaaatatatgagggttctaaaaatttttatccttgcgttgaaataaaggcttctcccgcaaaagtattacagggtcataatgtttttggtacaaccgatttagctttatgctctgaggctttattgcttaattttgctaattctttgccttgcctgtatgatttattggatgttggaatcgcctgatgcggtattttctccttacgcatctgtgcggtatttcacaccgcatatggtgcactctcagtacaatctgctctgatgccgcatagttaagccagccccgacacccgccaacacccgctgacgcgccctgacgggcttgtctgctcccggcatccgcttacagacaagctgtgaccgtctccgggagctgcatgtgtcagaggttttcaccgtcatcaccgaaacgcgcgagacgaaagggcctcgtgatacgcctatttttataggttaatgtcatgataataatggtttcttagacgtcagggtaccgggccccccctcgaggtcgacggtatcgataagcttgatatcgaattcctcggggaaatgtgcgcggaacccctatttgtttatttttctaaatacattcaaatatgtatccgctcatgagacaataaccctgataaatgcttcaataatattgaaaaaggaagagtatgagccatattcaacgggaaacgtcgaggccgcgattaaattccaacatggatgctgatttatatgggtataaatgggctcgcgataatgtcgggcaatcaggtgcgacaatctatcgcttgtatgggaagcccgatgcgccagagttgtttctgaaacatggcaaaggtagcgttgccaatgatgttacagatgagatggtcagactaaactggctgacggaatttatgcctcttccgaccatcaagcattttatccgtactcctgatgatgcatggttactcaccactgcgatccccggaaaaacagcattccaggtattagaagaatatcctgattcaggtgaaaatattgttgatgcgctggcagtgttcctgcgccggttgcattcgattcctgtttgtaattgtccttttaacagcgatcgcgtatttcgtctcgctcaggcgcaatcacgaatgaataacggtttggttgatgcgagtgattttgatgacgagcgtaatggctggcctgttgaacaagtctggaaagaaatgcataaacttttgccattctcaccggattcagtcgtcactcatggtgatttctcacttgataaccttatttttgacgaggggaaattaataggttgtattgatgttggacgagtcggaatcgcagaccgataccaggatcttgccatcctatggaactgcctcggtgagttttctccttcattacagaaacggctttttcaaaaatatggtattgataatcctgatatgaataaattgcagtttcatttgatgctcgatgagtttttctaagcgtataatggtctagagctagcatatggatccatcgattccattatacgcctgtcagaccaagtttactcatatatactttagattgatttaaaacttcatttttaatttaaaaggatctaggtgaagatcctttttgataatctcatgaccaaaatcccttaacgtgagttttcgttccactgagcgtcagaccccgtagaaaagatcaaaggatcttcttgagatcctttttttctgcgcgtaatctgctgcttgcaaacaaaaaaaccaccgctaccagcggtggtttgtttgccggatcaagagctaccaactctttttccgaaggtaactggcttcagcagagcgcagataccaaatactgttcttctagtgtagccgtagttaggccaccacttcaagaactctgtagcaccgcctacatacctcgctctgctaatcctgttaccagtggctgctgccagtggcgataagtcgtgtcttaccgggttggactcaagacgatagttaccggataaggcgcagcggtcgggctgaacggggggttcgtgcacacagcccagcttggagcgaacgacctacaccgaactgagatacctacagcgtgagctatgagaaagcgccacgcttcccgaagggagaaaggcggacaggtatccggtaagcggcagggtcggaacaggagagcgcacgagggagcttccagggggaaacgcctggtatctttatagtcctgtcgggtttcgccacctctgacttgagcgtcgatttttgtgatgctcgtcaggggggcggagcctatggaaaaacgccagcaacgcggcctttttacggttcctggcctttttttcctgcagcccgggggatccaagttctagagcccgccaccgcggtggagctcgctcacatgttctttcctgcgttatcccctgattctgtggataaccgtattaccgcctttgagtgagctgataccgctcgccgcagccgaacgaccgagcgcagcgagtcagtgagcgaggaagcggaagagcgcccaatacgcaaaccgcctctccccgcgcgttggccgattcattaatg

SEQ ID NO: 365 - DNA, 6051 bp, Artificial Sequence
  Description of Artificial Sequence: Synthetic polynucleotide
  I-1c.v9 (I-I+B)
cagctggcgtaatagcgaagaggcccgcaccgatcgcccttcccaacagttgcgcagcctgaatggcgaatggcgattccgttgcaatggctggcggtaatattgttctggatattaccagcaaggccgatagtttgagttcttctactcaggcaagtgatgttattactaatcaaagaagtattgcgacaacggttaatttgcgtgatggacagactcttttactcggtggcctcactgattataaaaacacttctcaggattctggcgtaccgttcctgtctaaaatccctttaatcggcctcctgtttagctcccgctctgattctaacgaggaaagcacgttatacgtgctcgtcaaagcaaccatagtacgcgccctgtagcggcgcattaagcgcggcgggtgtggtggttacgcgcagcgtgaccgctacacttgccagcgccctagcgcccgctcctttcgctttcttcccttcctttctcgccacgttcgccggctttccccgtcaagctctaaatcgggggctccctttagggttccgatttagtgctttacggcacctcgaccccaaaaaacttgattagggtgatggttcacgtagtgggccatcgccctgatagacggtttttcgccctttgacgttggagtccacgttctttaatagtggactcttgttccaaactggaacaacactcaaccctatctcggtctattcttttgatttataagggattttgccgatttcggcctattggttaaaaaatgagctgatttaacaaaaatttaacgcgaattttaacaaaatattaacgcttacaatttaaatatttgcttatacaatcttcctgtttttggggcttttctgattatcaaccggggtacatatgattgacatgctagttttacgattaccgttcatcgtctagagctagcatatggatccatcgatttagggataacagggtaattatcagcacacaattgcccattatacgcgcgtataatggactattgtgtgctgatatctgtacacttaagggctagatcttagcttacgtcactagagggtccacgtttagtttttaagatccattgatctcctaaacgctgcaagattcgcaacctggtatacttagcctaggcgctaggtcctagtgcagcgggactttttttctaaagtcgttgagaggaggagtcgtcagaccagatagctttgatgtcctgatcggaaggatcgttggcccccctgcaggcagctgttaattaaccgattcattaatgcagcagctgcgcgctcgctcgctcactgaggccgcccgggcaaagcccgggcgtcgggcgacctttggtcgcccggcctcagtgagcgagcgagcgcgcagagagggagtggcgcgccacgcgtggatctaatagtaatcaattacggggtcattagttcatagcccatatatggagttccgcgttacataacttacggtaaatggcccgcctggctgaccgcccaacgacccccgcccattgacgtcaataatgacgtatgttcccatagtaacgccaatagggactttccattgacgtcaatgggtggagtatttacggtaaactgcccacttggcagtacatcaagtgtatcatatgccaagtccgccccctattgacgtcaatgacggtaaatggcccgcctggcattatgcccagtacatgaccttacgggactttcctacttggcagtacatctacgtattagtcatcgctattaccatggtgatgcggttttggcagtacaccaatgggcgtggatagcggtttgactcacggggatttccaagtctccaccccattgacgtcaatgggagtttgttttggcaccaaaatcaacgggactttccaaaatgtcgtaataaccccgccccgttgacgcaaatgggcggtaggcgtgtacggtgggaggtctatataagcagagctcgtttagtgaaccgtcagatcactagaagctttattgcggtagtttatcacagttaaattgctaacgcagtcagtgcttctgacacaacagtctcgaacttaagctgcagaagttggtcgtgaggcactgggcaggtaagtatcaaggttacaagacaggtttaaggagaccaatagaaactgggcttgtcgagacagagaagactcttgcgtttctgataggcacctattggtcttactgacatccactttgcctttctctccacaggtgtccactcccagttcaattacagctcttaaggctagagtacttaatacgactcactataggctagcctctacggtaccgccaccatggaacaggacaacagccccaggaagatccagttcacagtgcccctgctggaaccccacctggaccctgaggctgctgagcagatcaggaggagaaggcctgaccctgccaccctggtgctgaccagtgaccagagcagccctgagattgatgaggacaggatccccaacccccacctgaagagcaccctggcctgataattcgaactgatcacttaccacatttgtagaggttttacttgctttaaaaaacctcccacacctccccctgaacctgaaacttaaattgattgcaattgttgttgttaacttgtttattgcagcttatattggttacaaataaagcaatagcatcacaaatttcacaaataaagcatttttttcactgcattctagttgtggtttgtccaaactcttcaatgtaacttaaggcgggaattgatctgtttaaacgcggccgcaggaacccctagtgatggagttggccactccctctctgcgcgctcgctcgctcactgaggccgggcgaccaaaggtcgcccgacgcccgggctttgcccgggcggcctcagtgagcgagcgagcgcgcagagagggagtggccaactggcgtaatagcgaagaggttaattaaggcgccctaggccgacccttagactctgtactcagttctataaacgagccattggatacgagatccgtagattgataagggacacggaatatccccggacgcaatagacaccggtggacagcttggtatcctgagcacagtcgcgcgtccgaatctagctctactttagaggccccggattctgatggtcgtagaccgcagaaccgattggggggatgagatctactagttatcagcacacaattgcccattatacgcgcgtataatggactattgtgtgctgatatagggataacagggtaattctagagctagcatatggatccatcgatttattctcttgtttgctccagactctcaggcaatgacctgatagcctttgtagagacctctcaaaaatagctaccctctccggcatgaatttatcagctagaacggttgaatatcatattgatggtgatttgactgtctccggcctttctcacccgtttgaatctttacctacacattactcaggcattgcatttaaaatatatgagggttctaaaaatttttatccttgcgttgaaataaaggcttctcccgcaaaagtattacagggtcataatgtttttggtacaaccgatttagctttatgctctgaggctttattgcttaattttgctaattctttgccttgcctgtatgatttattggatgttggaatcgcctgatgcggtattttctccttacgcatctgtgcggtatttcacaccgcatatggtgcactctcagtacaatctgctctgatgccgcatagttaagccagccccgacacccgccaacacccgctgacgcgccctgacgggcttgtctgctcccggcatccgcttacagacaagctgtgaccgtctccgggagctgcatgtgtcagaggttttcaccgtcatcaccgaaacgcgcgagacgaaagggcctcgtgatacgcctatttttataggttaatgtcatgataataatggtttcttagacgtcagggtaccgggccccccctcgaggtcgacggtatcgataagcttgatatcgaattcctcggggaaatgtgcgcggaacccctatttgtttatttttctaaatacattcaaatatgtatccgctcatgagacaataaccctgataaatgcttcaataatattgaaaaaggaagagtatgagccatattcaacgggaaacgtcgaggccgcgattaaattccaacatggatgctgatttatatgggtataaatgggctcgcgataatgtcgggcaatcaggtgcgacaatctatcgcttgtatgggaagcccgatgcgccagagttgtttctgaaacatggcaaaggtagcgttgccaatgatgttacagatgagatggtcagactaaactggctgacggaatttatgcctcttccgaccatcaagcattttatccgtactcctgatgatgcatggttactcaccactgcgatccccggaaaaacagcattccaggtattagaagaatatcctgattcaggtgaaaatattgttgatgcgctggcagtgttcctgcgccggttgcattcgattcctgtttgtaattgtccttttaacagcgatcgcgtatttcgtctcgctcaggcgcaatcacgaatgaataacggtttggttgatgcgagtgattttgatgacgagcgtaatggctggcctgttgaacaagtctggaaagaaatgcataaacttttgccattctcaccggattcagtcgtcactcatggtgatttctcacttgataaccttatttttgacgaggggaaattaataggttgtattgatgttggacgagtcggaatcgcagaccgataccaggatcttgccatcctatggaactgcctcggtgagttttctccttcattacagaaacggctttttcaaaaatatggtattgataatcctgatatgaataaattgcagtttcatttgatgctcgatgagtttttctaagcgtataatggtctagagctagcatatggatccatcgattccattatacgcctgtcagaccaagtttactcatatatactttagattgatttaaaacttcatttttaatttaaaaggatctaggtgaagatcctttttgataatctcatgaccaaaatcccttaacgtgagttttcgttccactgagcgtcagaccccgtagaaaagatcaaaggatcttcttgagatcctttttttctgcgcgtaatctgctgcttgcaaacaaaaaaaccaccgctaccagcggtggtttgtttgccggatcaagagctaccaactctttttccgaaggtaactggcttcagcagagcgcagataccaaatactgttcttctagtgtagccgtagttaggccaccacttcaagaactctgtagcaccgcctacatacctcgctctgctaatcctgttaccagtggctgctgccagtggcgataagtcgtgtcttaccgggttggactcaagacgatagttaccggataaggcgcagcggtcgggctgaacggggggttcgtgcacacagcccagcttggagcgaacgacctacaccgaactgagatacctacagcgtgagctatgagaaagcgccacgcttcccgaagggagaaaggcggacaggtatccggtaagcggcagggtcggaacaggagagcgcacgagggagcttccagggggaaacgcctggtatctttatagtcctgtcgggtttcgccacctctgacttgagcgtcgatttttgtgatgctcgtcaggggggcggagcctatggaaaaacgccagcaacgcggcctttttacggttcctggcctttttttcctgcagcccgggggatccaagttctagagcccgccaccgcggtggagctcgctcacatgttctttcctgcgttatcccctgattctgtggataaccgtattaccgcctttgagtgagctgataccgctcgccgcagccgaacgaccgagcgcagcgagtcagtgagcgaggaagcggaagagcgcccaatacgcaaaccgcctctccccgcgcgttggccgattcattaatg

SEQ ID NO: 366 - DNA, 6065 bp, Artificial Sequence
  Description of Artificial Sequence: Synthetic polynucleotide
  I-1c.v10 (I-I+B)
cagctggcgtaatagcgaagaggcccgcaccgatcgcccttcccaacagttgcgcagcctgaatggcgaatggcgattccgttgcaatggctggcggtaatattgttctggatattaccagcaaggccgatagtttgagttcttctactcaggcaagtgatgttattactaatcaaagaagtattgcgacaacggttaatttgcgtgatggacagactcttttactcggtggcctcactgattataaaaacacttctcaggattctggcgtaccgttcctgtctaaaatccctttaatcggcctcctgtttagctcccgctctgattctaacgaggaaagcacgttatacgtgctcgtcaaagcaaccatagtacgcgccctgtagcggcgcattaagcgcggcgggtgtggtggttacgcgcagcgtgaccgctacacttgccagcgccctagcgcccgctcctttcgctttcttcccttcctttctcgccacgttcgccggctttccccgtcaagctctaaatcgggggctccctttagggttccgatttagtgctttacggcacctcgaccccaaaaaacttgattagggtgatggttcacgtagtgggccatcgccctgatagacggtttttcgccctttgacgttggagtccacgttctttaatagtggactcttgttccaaactggaacaacactcaaccctatctcggtctattcttttgatttataagggattttgccgatttcggcctattggttaaaaaatgagctgatttaacaaaaatttaacgcgaattttaacaaaatattaacgcttacaatttaaatatttgcttatacaatcttcctgtttttggggcttttctgattatcaaccggggtacatatgattgacatgctagttttacgattaccgttcatcgtctagagctagcatatggatccatcgatttagggataacagggtaattatcagcacacaattgcccattatacgcgcgtataatggactattgtgtgctgatatctgtacacttaagggctagatcttagcttacgtcactagagggtccacgtttagtttttaagatccattgatctcctaaacgctgcaagattcgcaacctggtatacttagcctaggcgctaggtcctagtgcagcgggactttttttctaaagtcgttgagaggaggagtcgtcagaccagatagctttgatgtcctgatcggaaggatcgttggcccccctgcaggcagctgttaattaaccgattcattaatgcagcagctgcgcgctcgctcgctcactgaggccgcccgggcaaagcccgggcgtcgggcgacctttggtcgcccggcctcagtgagcgagcgagcgcgcagagagggagtggcgcgccacgcgtggatctaatagtaatcaattacggggtcattagttcatagcccatatatggagttccgcgttacataacttacggtaaatggcccgcctggctgaccgcccaacgacccccgcccattgacgtcaataatgacgtatgttcccatagtaacgccaatagggactttccattgacgtcaatgggtggagtatttacggtaaactgcccacttggcagtacatcaagtgtatcatatgccaagtccgccccctattgacgtcaatgacggtaaatggcccgcctggcattatgcccagtacatgaccttacgggactttcctacttggcagtacatctacgtattagtcatcgctattaccatggtgatgcggttttggcagtacaccaatgggcgtggatagcggtttgactcacggggatttccaagtctccaccccattgacgtcaatgggagtttgttttggcaccaaaatcaacgggactttccaaaatgtcgtaataaccccgccccgttgacgcaaatgggcggtaggcgtgtacggtgggaggtctatataagcagagctcgtttagtgaaccgtcagatcactagaagctttattgcggtagtttatcacagttaaattgctaacgcagtcagtgcttctgacacaacagtctcgaacttaagctgcagaagttggtcgtgaggcactgggcaggtaagtatcaaggttacaagacaggtttaaggagaccaatagaaactgggcttgtcgagacagagaagactcttgcgtttctgataggcacctattggtcttactgacatccactttgcctttctctccacaggtgtccactcccagttcaattacagctcttaaggctagagtacttaatacgactcactataggctagcctcgacggtaccgccaccatggaacaggacaacagcccccggaagatccagttcaccgtgcccctgctggaaccccacctggaccccgaggccgccgagcagatccggcggagaaggcccgaccccgccaccctggtgctgaccagcgaccagagcagccccgagatcgacgaggaccggatccccaacccccacctgaagagcaccctggcctgatgagggccgcgactctagatcataatcagccataccacatttgtagaggttttacttgctttaaaaaacctcccacacctccccctgaacctgaaacttaaattgattgcaattgttgttgttaacttgtttattgcagcttatattggttacaaataaagcaatagcatcacaaatttcacaaataaagcatttttttcactgcattctagttgtggtttgtccaaactcttcaatgtaacttaaggcgggaattgatctgtttaaacgcggccgcaggaacccctagtgatggagttggccactccctctctgcgcgctcgctcgctcactgaggccgggcgaccaaaggtcgcccgacgcccgggctttgcccgggcggcctcagtgagcgagcgagcgcgcagagagggagtggccaactggcgtaatagcgaagaggttaattaaggcgccctaggccgacccttagactctgtactcagttctataaacgagccattggatacgagatccgtagattgataagggacacggaatatccccggacgcaatagacaccggtggacagcttggtatcctgagcacagtcgcgcgtccgaatctagctctactttagaggccccggattctgatggtcgtagaccgcagaaccgattggggggatgagatctactagttatcagcacacaattgcccattatacgcgcgtataatggactattgtgtgctgatatagggataacagggtaattctagagctagcatatggatccatcgatttattctcttgtttgctccagactctcaggcaatgacctgatagcctttgtagagacctctcaaaaatagctaccctctccggcatgaatttatcagctagaacggttgaatatcatattgatggtgatttgactgtctccggcctttctcacccgtttgaatctttacctacacattactcaggcattgcatttaaaatatatgagggttctaaaaatttttatccttgcgttgaaataaaggcttctcccgcaaaagtattacagggtcataatgtttttggtacaaccgatttagctttatgctctgaggctttattgcttaattttgctaattctttgccttgcctgtatgatttattggatgttggaatcgcctgatgcggtattttctccttacgcatctgtgcggtatttcacaccgcatatggtgcactctcagtacaatctgctctgatgccgcatagttaagccagccccgacacccgccaacacccgctgacgcgccctgacgggcttgtctgctcccggcatccgcttacagacaagctgtgaccgtctccgggagctgcatgtgtcagaggttttcaccgtcatcaccgaaacgcgcgagacgaaagggcctcgtgatacgcctatttttataggttaatgtcatgataataatggtttcttagacgtcagggtaccgggccccccctcgaggtcgacggtatcgataagcttgatatcgaattcctcggggaaatgtgcgcggaacccctatttgtttatttttctaaatacattcaaatatgtatccgctcatgagacaataaccctgataaatgcttcaataatattgaaaaaggaagagtatgagccatattcaacgggaaacgtcgaggccgcgattaaattccaacatggatgctgatttatatgggtataaatgggctcgcgataatgtcgggcaatcaggtgcgacaatctatcgcttgtatgggaagcccgatgcgccagagttgtttctgaaacatggcaaaggtagcgttgccaatgatgttacagatgagatggtcagactaaactggctgacggaatttatgcctcttccgaccatcaagcattttatccgtactcctgatgatgcatggttactcaccactgcgatccccggaaaaacagcattccaggtattagaagaatatcctgattcaggtgaaaatattgttgatgcgctggcagtgttcctgcgccggttgcattcgattcctgtttgtaattgtccttttaacagcgatcgcgtatttcgtctcgctcaggcgcaatcacgaatgaataacggtttggttgatgcgagtgattttgatgacgagcgtaatggctggcctgttgaacaagtctggaaagaaatgcataaacttttgccattctcaccggattcagtcgtcactcatggtgatttctcacttgataaccttatttttgacgaggggaaattaataggttgtattgatgttggacgagtcggaatcgcagaccgataccaggatcttgccatcctatggaactgcctcggtgagttttctccttcattacagaaacggctttttcaaaaatatggtattgataatcctgatatgaataaattgcagtttcatttgatgctcgatgagtttttctaagcgtataatggtctagagctagcatatggatccatcgattccattatacgcctgtcagaccaagtttactcatatatactttagattgatttaaaacttcatttttaatttaaaaggatctaggtgaagatcctttttgataatctcatgaccaaaatcccttaacgtgagttttcgttccactgagcgtcagaccccgtagaaaagatcaaaggatcttcttgagatcctttttttctgcgcgtaatctgctgcttgcaaacaaaaaaaccaccgctaccagcggtggtttgtttgccggatcaagagctaccaactctttttccgaaggtaactggcttcagcagagcgcagataccaaatactgttcttctagtgtagccgtagttaggccaccacttcaagaactctgtagcaccgcctacatacctcgctctgctaatcctgttaccagtggctgctgccagtggcgataagtcgtgtcttaccgggttggactcaagacgatagttaccggataaggcgcagcggtcgggctgaacggggggttcgtgcacacagcccagcttggagcgaacgacctacaccgaactgagatacctacagcgtgagctatgagaaagcgccacgcttcccgaagggagaaaggcggacaggtatccggtaagcggcagggtcggaacaggagagcgcacgagggagcttccagggggaaacgcctggtatctttatagtcctgtcgggtttcgccacctctgacttgagcgtcgatttttgtgatgctcgtcaggggggcggagcctatggaaaaacgccagcaacgcggcctttttacggttcctggcctttttttcctgcagcccgggggatccaagttctagagcccgccaccgcggtggagctcgctcacatgttctttcctgcgttatcccctgattctgtggataaccgtattaccgcctttgagtgagctgataccgctcgccgcagccgaacgaccgagcgcagcgagtcagtgagcgaggaagcggaagagcgcccaatacgcaaaccgcctctccccgcgcgttggccgattcattaatg

SEQ ID NO: 367 - DNA, 6390 bp, Artificial Sequence
  Description of Artificial Sequence: Synthetic polynucleotide
  I-1c.v11 (I-I+B)
cagctggcgtaatagcgaagaggcccgcaccgatcgcccttcccaacagttgcgcagcctgaatggcgaatggcgattccgttgcaatggctggcggtaatattgttctggatattaccagcaaggccgatagtttgagttcttctactcaggcaagtgatgttattactaatcaaagaagtattgcgacaacggttaatttgcgtgatggacagactcttttactcggtggcctcactgattataaaaacacttctcaggattctggcgtaccgttcctgtctaaaatccctttaatcggcctcctgtttagctcccgctctgattctaacgaggaaagcacgttatacgtgctcgtcaaagcaaccatagtacgcgccctgtagcggcgcattaagcgcggcgggtgtggtggttacgcgcagcgtgaccgctacacttgccagcgccctagcgcccgctcctttcgctttcttcccttcctttctcgccacgttcgccggctttccccgtcaagctctaaatcgggggctccctttagggttccgatttagtgctttacggcacctcgaccccaaaaaacttgattagggtgatggttcacgtagtgggccatcgccctgatagacggtttttcgccctttgacgttggagtccacgttctttaatagtggactcttgttccaaactggaacaacactcaaccctatctcggtctattcttttgatttataagggattttgccgatttcggcctattggttaaaaaatgagctgatttaacaaaaatttaacgcgaattttaacaaaatattaacgcttacaatttaaatatttgcttatacaatcttcctgtttttggggcttttctgattatcaaccggggtacatatgattgacatgctagttttacgattaccgttcatcgtctagagctagcatatggatccatcgatttagggataacagggtaattatcagcacacaattgcccattatacgcgcgtataatggactattgtgtgctgatatctgtacacttaagggctagatcttagcttacgtcactagagggtccacgtttagtttttaagatccattgatctcctaaacgctgcaagattcgcaacctggtatacttagcctaggcgctaggtcctagtgcagcgggactttttttctaaagtcgttgagaggaggagtcgtcagaccagatagctttgatgtcctgatcggaaggatcgttggcccccctgcaggcagctgttaattaaccgattcattaatgcagcagctgcgcgctcgctcgctcactgaggccgcccgggcaaagcccgggcgtcgggcgacctttggtcgcccggcctcagtgagcgagcgagcgcgcagagagggagtggcgcgccacgcgtggatctaatagtaatcaattacggggtcattagttcatagcccatatatggagttccgcgttacataacttacggtaaatggcccgcctggctgaccgcccaacgacccccgcccattgacgtcaataatgacgtatgttcccatagtaacgccaatagggactttccattgacgtcaatgggtggagtatttacggtaaactgcccacttggcagtacatcaagtgtatcatatgccaagtccgccccctattgacgtcaatgacggtaaatggcccgcctggcattatgcccagtacatgaccttacgggactttcctacttggcagtacatctacgtattagtcatcgctattaccatggtgatgcggttttggcagtacaccaatgggcgtggatagcggtttgactcacggggatttccaagtctccaccccattgacgtcaatgggagtttgttttggcaccaaaatcaacgggactttccaaaatgtcgtaataaccccgccccgttgacgcaaatgggcggtaggcgtgtacggtgggaggtctatataagcagagctcgtttagtgaaccgtcagatcactagtgcttctgacacaacagtctcgaacttaagctgcagaagttggtcgtgaggcactgggcaggtaagtatcaaggttacaagacaggtttaaggagaccaatagaaactgggcttgtcgagacagagaagactcttgcgtttctgataggcacctattggtcttactgacatccactttgcctttctctccacaggtgtccactcccagttcaatagtactgccaccatggagcaggacaacagccccagaaagatccagttcactgtgcccctgctggagccccacctggaccctgaggcagcagagcagatcagaagaagaagacctgaccctgccaccctggtgctgacctctgaccagagcagccctgagattgacgaggacagaatccccaacccccacctgaagagcaccctggcctgataattcgaactgatcacttttttaataaaaggggcatttggaaaaaaaaaaaaaaggtagcagtcgacagatgaattctgcagatctgtggcttctagctgcccgggtggcatccctgtgacccctccccagtgcctctcctggccctggaagttgccactccagtgcccaccagccttgtcctaataaaattaagttgcatcattttgtctgactaggtgtccttctataatattatggggtggaggggggtggtatggagcaaggggcaagttgggaagacaacctgtagggcctgcggggtctattgggaaccaagctggagtgcagtggcacaatcttggctcactgcaatctccgcctcctgggttcaagcgattctcctgcctcagcctcccgagttgttgggattccaggcatgcatgaccaggctcagctaatttttgtttttttggtagagacggggtttcaccatattggccaggctggtctccaactcctaatctcaggtgatctacccaccttggcctcccaaattgctgggattacaggcgtgaaccactgctcccttccctgtccttctgattttaaaaaaaagagaaatgttctggcacctgcacttgcactggggacagcctattttgctagtttgttttgtttcgttttgttttgatggagagcgtatgttgtttaaacgcggccgcaggaacccctagtgatggagttggccactccctctctgcgcgctcgctcgctcactgaggccgggcgaccaaaggtcgcccgacgcccgggctttgcccgggcggcctcagtgagcgagcgagcgcgcagagagggagtggccaactggcgtaatagcgaagaggttaattaaggcgccctaggccgacccttagactctgtactcagttctataaacgagccattggatacgagatccgtagattgataagggacacggaatatccccggacgcaatagacaccggtggacagcttggtatcctgagcacagtcgcgcgtccgaatctagctctactttagaggccccggattctgatggtcgtagaccgcagaaccgattggggggatgagatctactagttatcagcacacaattgcccattatacgcgcgtataatggactattgtgtgctgatatagggataacagggtaattctagagctagcatatggatccatcgatttattctcttgtttgctccagactctcaggcaatgacctgatagcctttgtagagacctctcaaaaatagctaccctctccggcatgaatttatcagctagaacggttgaatatcatattgatggtgatttgactgtctccggcctttctcacccgtttgaatctttacctacacattactcaggcattgcatttaaaatatatgagggttctaaaaatttttatccttgcgttgaaataaaggcttctcccgcaaaagtattacagggtcataatgtttttggtacaaccgatttagctttatgctctgaggctttattgcttaattttgctaattctttgccttgcctgtatgatttattggatgttggaatcgcctgatgcggtattttctccttacgcatctgtgcggtatttcacaccgcatatggtgcactctcagtacaatctgctctgatgccgcatagttaagccagccccgacacccgccaacacccgctgacgcgccctgacgggcttgtctgctcccggcatccgcttacagacaagctgtgaccgtctccgggagctgcatgtgtcagaggttttcaccgtcatcaccgaaacgcgcgagacgaaagggcctcgtgatacgcctatttttataggttaatgtcatgataataatggtttcttagacgtcagggtaccgggccccccctcgaggtcgacggtatcgataagcttgatatcgaattcctcggggaaatgtgcgcggaacccctatttgtttatttttctaaatacattcaaatatgtatccgctcatgagacaataaccctgataaatgcttcaataatattgaaaaaggaagagtatgagccatattcaacgggaaacgtcgaggccgcgattaaattccaacatggatgctgatttatatgggtataaatgggctcgcgataatgtcgggcaatcaggtgcgacaatctatcgcttgtatgggaagcccgatgcgccagagttgtttctgaaacatggcaaaggtagcgttgccaatgatgttacagatgagatggtcagactaaactggctgacggaatttatgcctcttccgaccatcaagcattttatccgtactcctgatgatgcatggttactcaccactgcgatccccggaaaaacagcattccaggtattagaagaatatcctgattcaggtgaaaatattgttgatgcgctggcagtgttcctgcgccggttgcattcgattcctgtttgtaattgtccttttaacagcgatcgcgtatttcgtctcgctcaggcgcaatcacgaatgaataacggtttggttgatgcgagtgattttgatgacgagcgtaatggctggcctgttgaacaagtctggaaagaaatgcataaacttttgccattctcaccggattcagtcgtcactcatggtgatttctcacttgataaccttatttttgacgaggggaaattaataggttgtattgatgttggacgagtcggaatcgcagaccgataccaggatcttgccatcctatggaactgcctcggtgagttttctccttcattacagaaacggctttttcaaaaatatggtattgataatcctgatatgaataaattgcagtttcatttgatgctcgatgagtttttctaagcgtataatggtctagagctagcatatggatccatcgattccattatacgcctgtcagaccaagtttactcatatatactttagattgatttaaaacttcatttttaatttaaaaggatctaggtgaagatcctttttgataatctcatgaccaaaatcccttaacgtgagttttcgttccactgagcgtcagaccccgtagaaaagatcaaaggatcttcttgagatcctttttttctgcgcgtaatctgctgcttgcaaacaaaaaaaccaccgctaccagcggtggtttgtttgccggatcaagagctaccaactctttttccgaaggtaactggcttcagcagagcgcagataccaaatactgttcttctagtgtagccgtagttaggccaccacttcaagaactctgtagcaccgcctacatacctcgctctgctaatcctgttaccagtggctgctgccagtggcgataagtcgtgtcttaccgggttggactcaagacgatagttaccggataaggcgcagcggtcgggctgaacggggggttcgtgcacacagcccagcttggagcgaacgacctacaccgaactgagatacctacagcgtgagctatgagaaagcgccacgcttcccgaagggagaaaggcggacaggtatccggtaagcggcagggtcggaacaggagagcgcacgagggagcttccagggggaaacgcctggtatctttatagtcctgtcgggtttcgccacctctgacttgagcgtcgatttttgtgatgctcgtcaggggggcggagcctatggaaaaacgccagcaacgcggcctttttacggttcctggcctttttttcctgcagcccgggggatccaagttctagagcccgccaccgcggtggagctcgctcacatgttctttcctgcgttatcccctgattctgtggataaccgtattaccgcctttgagtgagctgataccgctcgccgcagccgaacgaccgagcgcagcgagtcagtgagcgaggaagcggaagagcgcccaatacgcaaaccgcctctccccgcgcgttggccgattcattaatg

SEQ ID NO: 368 - DNA, 6390 bp, Artificial Sequence
  Description of Artificial Sequence: Synthetic polynucleotide
  I-1c.v12 (I-I+B)
cagctggcgtaatagcgaagaggcccgcaccgatcgcccttcccaacagttgcgcagcctgaatggcgaatggcgattccgttgcaatggctggcggtaatattgttctggatattaccagcaaggccgatagtttgagttcttctactcaggcaagtgatgttattactaatcaaagaagtattgcgacaacggttaatttgcgtgatggacagactcttttactcggtggcctcactgattataaaaacacttctcaggattctggcgtaccgttcctgtctaaaatccctttaatcggcctcctgtttagctcccgctctgattctaacgaggaaagcacgttatacgtgctcgtcaaagcaaccatagtacgcgccctgtagcggcgcattaagcgcggcgggtgtggtggttacgcgcagcgtgaccgctacacttgccagcgccctagcgcccgctcctttcgctttcttcccttcctttctcgccacgttcgccggctttccccgtcaagctctaaatcgggggctccctttagggttccgatttagtgctttacggcacctcgaccccaaaaaacttgattagggtgatggttcacgtagtgggccatcgccctgatagacggtttttcgccctttgacgttggagtccacgttctttaatagtggactcttgttccaaactggaacaacactcaaccctatctcggtctattcttttgatttataagggattttgccgatttcggcctattggttaaaaaatgagctgatttaacaaaaatttaacgcgaattttaacaaaatattaacgcttacaatttaaatatttgcttatacaatcttcctgtttttggggcttttctgattatcaaccggggtacatatgattgacatgctagttttacgattaccgttcatcgtctagagctagcatatggatccatcgatttagggataacagggtaattatcagcacacaattgcccattatacgcgcgtataatggactattgtgtgctgatatctgtacacttaagggctagatcttagcttacgtcactagagggtccacgtttagtttttaagatccattgatctcctaaacgctgcaagattcgcaacctggtatacttagcctaggcgctaggtcctagtgcagcgggactttttttctaaagtcgttgagaggaggagtcgtcagaccagatagctttgatgtcctgatcggaaggatcgttggcccccctgcaggcagctgttaattaaccgattcattaatgcagcagctgcgcgctcgctcgctcactgaggccgcccgggcaaagcccgggcgtcgggcgacctttggtcgcccggcctcagtgagcgagcgagcgcgcagagagggagtggcgcgccacgcgtggatctaatagtaatcaattacggggtcattagttcatagcccatatatggagttccgcgttacataacttacggtaaatggcccgcctggctgaccgcccaacgacccccgcccattgacgtcaataatgacgtatgttcccatagtaacgccaatagggactttccattgacgtcaatgggtggagtatttacggtaaactgcccacttggcagtacatcaagtgtatcatatgccaagtccgccccctattgacgtcaatgacggtaaatggcccgcctggcattatgcccagtacatgaccttacgggactttcctacttggcagtacatctacgtattagtcatcgctattaccatggtgatgcggttttggcagtacaccaatgggcgtggatagcggtttgactcacggggatttccaagtctccaccccattgacgtcaatgggagtttgttttggcaccaaaatcaacgggactttccaaaatgtcgtaataaccccgccccgttgacgcaaatgggcggtaggcgtgtacggtgggaggtctatataagcagagctcgtttagtgaaccgtcagatcactagtgcttctgacacaacagtctcgaacttaagctgcagaagttggtcgtgaggcactgggcaggtaagtatcaaggttacaagacaggtttaaggagaccaatagaaactgggcttgtcgagacagagaagactcttgcgtttctgataggcacctattggtcttactgacatccactttgcctttctctccacaggtgtccactcccagttcaatagtactgccaccatggaacaagacaactcccccagaaagatacagttcactgtgcccctgctggagcctcacctggaccctgaggcagcagagcagatcagaagaaggagaccagaccctgccaccctggtgctcacttctgaccagagcagtcctgaaattgacgaagacagaattcctaacccccacctaaagtccaccctggcctgataattcgaactgatcacttttttaataaaaggggcatttggaaaaaaaaaaaaaaggtagcagtcgacagatgaattctgcagatctgtggcttctagctgcccgggtggcatccctgtgacccctccccagtgcctctcctggccctggaagttgccactccagtgcccaccagccttgtcctaataaaattaagttgcatcattttgtctgactaggtgtccttctataatattatggggtggaggggggtggtatggagcaaggggcaagttgggaagacaacctgtagggcctgcggggtctattgggaaccaagctggagtgcagtggcacaatcttggctcactgcaatctccgcctcctgggttcaagcgattctcctgcctcagcctcccgagttgttgggattccaggcatgcatgaccaggctcagctaatttttgtttttttggtagagacggggtttcaccatattggccaggctggtctccaactcctaatctcaggtgatctacccaccttggcctcccaaattgctgggattacaggcgtgaaccactgctcccttccctgtccttctgattttaaaaaaaagagaaatgttctggcacctgcacttgcactggggacagcctattttgctagtttgttttgtttcgttttgttttgatggagagcgtatgttgtttaaacgcggccgcaggaacccctagtgatggagttggccactccctctctgcgcgctcgctcgctcactgaggccgggcgaccaaaggtcgcccgacgcccgggctttgcccgggcggcctcagtgagcgagcgagcgcgcagagagggagtggccaactggcgtaatagcgaagaggttaattaaggcgccctaggccgacccttagactctgtactcagttctataaacgagccattggatacgagatccgtagattgataagggacacggaatatccccggacgcaatagacaccggtggacagcttggtatcctgagcacagtcgcgcgtccgaatctagctctactttagaggccccggattctgatggtcgtagaccgcagaaccgattggggggatgagatctactagttatcagcacacaattgcccattatacgcgcgtataatggactattgtgtgctgatatagggataacagggtaattctagagctagcatatggatccatcgatttattctcttgtttgctccagactctcaggcaatgacctgatagcctttgtagagacctctcaaaaatagctaccctctccggcatgaatttatcagctagaacggttgaatatcatattgatggtgatttgactgtctccggcctttctcacccgtttgaatctttacctacacattactcaggcattgcatttaaaatatatgagggttctaaaaatttttatccttgcgttgaaataaaggcttctcccgcaaaagtattacagggtcataatgtttttggtacaaccgatttagctttatgctctgaggctttattgcttaattttgctaattctttgccttgcctgtatgatttattggatgttggaatcgcctgatgcggtattttctccttacgcatctgtgcggtatttcacaccgcatatggtgcactctcagtacaatctgctctgatgccgcatagttaagccagccccgacacccgccaacacccgctgacgcgccctgacgggcttgtctgctcccggcatccgcttacagacaagctgtgaccgtctccgggagctgcatgtgtcagaggttttcaccgtcatcaccgaaacgcgcgagacgaaagggcctcgtgatacgcctatttttataggttaatgtcatgataataatggtttcttagacgtcagggtaccgggccccccctcgaggtcgacggtatcgataagcttgatatcgaattcctcggggaaatgtgcgcggaacccctatttgtttatttttctaaatacattcaaatatgtatccgctcatgagacaataaccctgataaatgcttcaataatattgaaaaaggaagagtatgagccatattcaacgggaaacgtcgaggccgcgattaaattccaacatggatgctgatttatatgggtataaatgggctcgcgataatgtcgggcaatcaggtgcgacaatctatcgcttgtatgggaagcccgatgcgccagagttgtttctgaaacatggcaaaggtagcgttgccaatgatgttacagatgagatggtcagactaaactggctgacggaatttatgcctcttccgaccatcaagcattttatccgtactcctgatgatgcatggttactcaccactgcgatccccggaaaaacagcattccaggtattagaagaatatcctgattcaggtgaaaatattgttgatgcgctggcagtgttcctgcgccggttgcattcgattcctgtttgtaattgtccttttaacagcgatcgcgtatttcgtctcgctcaggcgcaatcacgaatgaataacggtttggttgatgcgagtgattttgatgacgagcgtaatggctggcctgttgaacaagtctggaaagaaatgcataaacttttgccattctcaccggattcagtcgtcactcatggtgatttctcacttgataaccttatttttgacgaggggaaattaataggttgtattgatgttggacgagtcggaatcgcagaccgataccaggatcttgccatcctatggaactgcctcggtgagttttctccttcattacagaaacggctttttcaaaaatatggtattgataatcctgatatgaataaattgcagtttcatttgatgctcgatgagtttttctaagcgtataatggtctagagctagcatatggatccatcgattccattatacgcctgtcagaccaagtttactcatatatactttagattgatttaaaacttcatttttaatttaaaaggatctaggtgaagatcctttttgataatctcatgaccaaaatcccttaacgtgagttttcgttccactgagcgtcagaccccgtagaaaagatcaaaggatcttcttgagatcctttttttctgcgcgtaatctgctgcttgcaaacaaaaaaaccaccgctaccagcggtggtttgtttgccggatcaagagctaccaactctttttccgaaggtaactggcttcagcagagcgcagataccaaatactgttcttctagtgtagccgtagttaggccaccacttcaagaactctgtagcaccgcctacatacctcgctctgctaatcctgttaccagtggctgctgccagtggcgataagtcgtgtcttaccgggttggactcaagacgatagttaccggataaggcgcagcggtcgggctgaacggggggttcgtgcacacagcccagcttggagcgaacgacctacaccgaactgagatacctacagcgtgagctatgagaaagcgccacgcttcccgaagggagaaaggcggacaggtatccggtaagcggcagggtcggaacaggagagcgcacgagggagcttccagggggaaacgcctggtatctttatagtcctgtcgggtttcgccacctctgacttgagcgtcgatttttgtgatgctcgtcaggggggcggagcctatggaaaaacgccagcaacgcggcctttttacggttcctggcctttttttcctgcagcccgggggatccaagttctagagcccgccaccgcggtggagctcgctcacatgttctttcctgcgttatcccctgattctgtggataaccgtattaccgcctttgagtgagctgataccgctcgccgcagccgaacgaccgagcgcagcgagtcagtgagcgaggaagcggaagagcgcccaatacgcaaaccgcctctccccgcgcgttggccgattcattaatg

SEQ ID NO: 369 - DNA, 6390 bp, Artificial Sequence
  Description of Artificial Sequence: Synthetic polynucleotide
  I-1c.v13 (I-I+B)
cagctggcgtaatagcgaagaggcccgcaccgatcgcccttcccaacagttgcgcagcctgaatggcgaatggcgattccgttgcaatggctggcggtaatattgttctggatattaccagcaaggccgatagtttgagttcttctactcaggcaagtgatgttattactaatcaaagaagtattgcgacaacggttaatttgcgtgatggacagactcttttactcggtggcctcactgattataaaaacacttctcaggattctggcgtaccgttcctgtctaaaatccctttaatcggcctcctgtttagctcccgctctgattctaacgaggaaagcacgttatacgtgctcgtcaaagcaaccatagtacgcgccctgtagcggcgcattaagcgcggcgggtgtggtggttacgcgcagcgtgaccgctacacttgccagcgccctagcgcccgctcctttcgctttcttcccttcctttctcgccacgttcgccggctttccccgtcaagctctaaatcgggggctccctttagggttccgatttagtgctttacggcacctcgaccccaaaaaacttgattagggtgatggttcacgtagtgggccatcgccctgatagacggtttttcgccctttgacgttggagtccacgttctttaatagtggactcttgttccaaactggaacaacactcaaccctatctcggtctattcttttgatttataagggattttgccgatttcggcctattggttaaaaaatgagctgatttaacaaaaatttaacgcgaattttaacaaaatattaacgcttacaatttaaatatttgcttatacaatcttcctgtttttggggcttttctgattatcaaccggggtacatatgattgacatgctagttttacgattaccgttcatcgtctagagctagcatatggatccatcgatttagggataacagggtaattatcagcacacaattgcccattatacgcgcgtataatggactattgtgtgctgatatctgtacacttaagggctagatcttagcttacgtcactagagggtccacgtttagtttttaagatccattgatctcctaaacgctgcaagattcgcaacctggtatacttagcctaggcgctaggtcctagtgcagcgggactttttttctaaagtcgttgagaggaggagtcgtcagaccagatagctttgatgtcctgatcggaaggatcgttggcccccctgcaggcagctgttaattaaccgattcattaatgcagcagctgcgcgctcgctcgctcactgaggccgcccgggcaaagcccgggcgtcgggcgacctttggtcgcccggcctcagtgagcgagcgagcgcgcagagagggagtggcgcgccacgcgtggatctaatagtaatcaattacggggtcattagttcatagcccatatatggagttccgcgttacataacttacggtaaatggcccgcctggctgaccgcccaacgacccccgcccattgacgtcaataatgacgtatgttcccatagtaacgccaatagggactttccattgacgtcaatgggtggagtatttacggtaaactgcccacttggcagtacatcaagtgtatcatatgccaagtccgccccctattgacgtcaatgacggtaaatggcccgcctggcattatgcccagtacatgaccttacgggactttcctacttggcagtacatctacgtattagtcatcgctattaccatggtgatgcggttttggcagtacaccaatgggcgtggatagcggtttgactcacggggatttccaagtctccaccccattgacgtcaatgggagtttgttttggcaccaaaatcaacgggactttccaaaatgtcgtaataaccccgccccgttgacgcaaatgggcggtaggcgtgtacggtgggaggtctatataagcagagctcgtttagtgaaccgtcagatcactagtgcttctgacacaacagtctcgaacttaagctgcagaagttggtcgtgaggcactgggcaggtaagtatcaaggttacaagacaggtttaaggagaccaatagaaactgggcttgtcgagacagagaagactcttgcgtttctgataggcacctattggtcttactgacatccactttgcctttctctccacaggtgtccactcccagttcaatagtactgccaccatggagcaggacaacagcccaaggaagatccagttcactgtgccactgctggagccacacctggacccagaggcagcagagcagatcagaagaagaagaccagacccagccaccctggtgctgacctctgaccagagcagcccagagattgacgaggacagaatcccaaacccacacctgaagagcaccctggcctgataattcgaactgatcacttttttaataaaaggggcatttggaaaaaaaaaaaaaaggtagcagtcgacagatgaattctgcagatctgtggcttctagctgcccgggtggcatccctgtgacccctccccagtgcctctcctggccctggaagttgccactccagtgcccaccagccttgtcctaataaaattaagttgcatcattttgtctgactaggtgtccttctataatattatggggtggaggggggtggtatggagcaaggggcaagttgggaagacaacctgtagggcctgcggggtctattgggaaccaagctggagtgcagtggcacaatcttggctcactgcaatctccgcctcctgggttcaagcgattctcctgcctcagcctcccgagttgttgggattccaggcatgcatgaccaggctcagctaatttttgtttttttggtagagacggggtttcaccatattggccaggctggtctccaactcctaatctcaggtgatctacccaccttggcctcccaaattgctgggattacaggcgtgaaccactgctcccttccctgtccttctgattttaaaaaaaagagaaatgttctggcacctgcacttgcactggggacagcctattttgctagtttgttttgtttcgttttgttttgatggagagcgtatgttgtttaaacgcggccgcaggaacccctagtgatggagttggccactccctctctgcgcgctcgctcgctcactgaggccgggcgaccaaaggtcgcccgacgcccgggctttgcccgggcggcctcagtgagcgagcgagcgcgcagagagggagtggccaactggcgtaatagcgaagaggttaattaaggcgccctaggccgacccttagactctgtactcagttctataaacgagccattggatacgagatccgtagattgataagggacacggaatatccccggacgcaatagacaccggtggacagcttggtatcctgagcacagtcgcgcgtccgaatctagctctactttagaggccccggattctgatggtcgtagaccgcagaaccgattggggggatgagatctactagttatcagcacacaattgcccattatacgcgcgtataatggactattgtgtgctgatatagggataacagggtaattctagagctagcatatggatccatcgatttattctcttgtttgctccagactctcaggcaatgacctgatagcctttgtagagacctctcaaaaatagctaccctctccggcatgaatttatcagctagaacggttgaatatcatattgatggtgatttgactgtctccggcctttctcacccgtttgaatctttacctacacattactcaggcattgcatttaaaatatatgagggttctaaaaatttttatccttgcgttgaaataaaggcttctcccgcaaaagtattacagggtcataatgtttttggtacaaccgatttagctttatgctctgaggctttattgcttaattttgctaattctttgccttgcctgtatgatttattggatgttggaatcgcctgatgcggtattttctccttacgcatctgtgcggtatttcacaccgcatatggtgcactctcagtacaatctgctctgatgccgcatagttaagccagccccgacacccgccaacacccgctgacgcgccctgacgggcttgtctgctcccggcatccgcttacagacaagctgtgaccgtctccgggagctgcatgtgtcagaggttttcaccgtcatcaccgaaacgcgcgagacgaaagggcctcgtgatacgcctatttttataggttaatgtcatgataataatggtttcttagacgtcagggtaccgggccccccctcgaggtcgacggtatcgataagcttgatatcgaattcctcggggaaatgtgcgcggaacccctatttgtttatttttctaaatacattcaaatatgtatccgctcatgagacaataaccctgataaatgcttcaataatattgaaaaaggaagagtatgagccatattcaacgggaaacgtcgaggccgcgattaaattccaacatggatgctgatttatatgggtataaatgggctcgcgataatgtcgggcaatcaggtgcgacaatctatcgcttgtatgggaagcccgatgcgccagagttgtttctgaaacatggcaaaggtagcgttgccaatgatgttacagatgagatggtcagactaaactggctgacggaatttatgcctcttccgaccatcaagcattttatccgtactcctgatgatgcatggttactcaccactgcgatccccggaaaaacagcattccaggtattagaagaatatcctgattcaggtgaaaatattgttgatgcgctggcagtgttcctgcgccggttgcattcgattcctgtttgtaattgtccttttaacagcgatcgcgtatttcgtctcgctcaggcgcaatcacgaatgaataacggtttggttgatgcgagtgattttgatgacgagcgtaatggctggcctgttgaacaagtctggaaagaaatgcataaacttttgccattctcaccggattcagtcgtcactcatggtgatttctcacttgataaccttatttttgacgaggggaaattaataggttgtattgatgttggacgagtcggaatcgcagaccgataccaggatcttgccatcctatggaactgcctcggtgagttttctccttcattacagaaacggctttttcaaaaatatggtattgataatcctgatatgaataaattgcagtttcatttgatgctcgatgagtttttctaagcgtataatggtctagagctagcatatggatccatcgattccattatacgcctgtcagaccaagtttactcatatatactttagattgatttaaaacttcatttttaatttaaaaggatctaggtgaagatcctttttgataatctcatgaccaaaatcccttaacgtgagttttcgttccactgagcgtcagaccccgtagaaaagatcaaaggatcttcttgagatcctttttttctgcgcgtaatctgctgcttgcaaacaaaaaaaccaccgctaccagcggtggtttgtttgccggatcaagagctaccaactctttttccgaaggtaactggcttcagcagagcgcagataccaaatactgttcttctagtgtagccgtagttaggccaccacttcaagaactctgtagcaccgcctacatacctcgctctgctaatcctgttaccagtggctgctgccagtggcgataagtcgtgtcttaccgggttggactcaagacgatagttaccggataaggcgcagcggtcgggctgaacggggggttcgtgcacacagcccagcttggagcgaacgacctacaccgaactgagatacctacagcgtgagctatgagaaagcgccacgcttcccgaagggagaaaggcggacaggtatccggtaagcggcagggtcggaacaggagagcgcacgagggagcttccagggggaaacgcctggtatctttatagtcctgtcgggtttcgccacctctgacttgagcgtcgatttttgtgatgctcgtcaggggggcggagcctatggaaaaacgccagcaacgcggcctttttacggttcctggcctttttttcctgcagcccgggggatccaagttctagagcccgccaccgcggtggagctcgctcacatgttctttcctgcgttatcccctgattctgtggataaccgtattaccgcctttgagtgagctgataccgctcgccgcagccgaacgaccgagcgcagcgagtcagtgagcgaggaagcggaagagcgcccaatacgcaaaccgcctctccccgcgcgttggccgattcattaatg

SEQ ID NO: 370 - DNA, 6390 bp, Artificial Sequence
  Description of Artificial Sequence: Synthetic polynucleotide
  I-1c.v14 (I-I+B)
cagctggcgtaatagcgaagaggcccgcaccgatcgcccttcccaacagttgcgcagcctgaatggcgaatggcgattccgttgcaatggctggcggtaatattgttctggatattaccagcaaggccgatagtttgagttcttctactcaggcaagtgatgttattactaatcaaagaagtattgcgacaacggttaatttgcgtgatggacagactcttttactcggtggcctcactgattataaaaacacttctcaggattctggcgtaccgttcctgtctaaaatccctttaatcggcctcctgtttagctcccgctctgattctaacgaggaaagcacgttatacgtgctcgtcaaagcaaccatagtacgcgccctgtagcggcgcattaagcgcggcgggtgtggtggttacgcgcagcgtgaccgctacacttgccagcgccctagcgcccgctcctttcgctttcttcccttcctttctcgccacgttcgccggctttccccgtcaagctctaaatcgggggctccctttagggttccgatttagtgctttacggcacctcgaccccaaaaaacttgattagggtgatggttcacgtagtgggccatcgccctgatagacggtttttcgccctttgacgttggagtccacgttctttaatagtggactcttgttccaaactggaacaacactcaaccctatctcggtctattcttttgatttataagggattttgccgatttcggcctattggttaaaaaatgagctgatttaacaaaaatttaacgcgaattttaacaaaatattaacgcttacaatttaaatatttgcttatacaatcttcctgtttttggggcttttctgattatcaaccggggtacatatgattgacatgctagttttacgattaccgttcatcgtctagagctagcatatggatccatcgatttagggataacagggtaattatcagcacacaattgcccattatacgcgcgtataatggactattgtgtgctgatatctgtacacttaagggctagatcttagcttacgtcactagagggtccacgtttagtttttaagatccattgatctcctaaacgctgcaagattcgcaacctggtatacttagcctaggcgctaggtcctagtgcagcgggactttttttctaaagtcgttgagaggaggagtcgtcagaccagatagctttgatgtcctgatcggaaggatcgttggcccccctgcaggcagctgttaattaaccgattcattaatgcagcagctgcgcgctcgctcgctcactgaggccgcccgggcaaagcccgggcgtcgggcgacctttggtcgcccggcctcagtgagcgagcgagcgcgcagagagggagtggcgcgccacgcgtggatctaatagtaatcaattacggggtcattagttcatagcccatatatggagttccgcgttacataacttacggtaaatggcccgcctggctgaccgcccaacgacccccgcccattgacgtcaataatgacgtatgttcccatagtaacgccaatagggactttccattgacgtcaatgggtggagtatttacggtaaactgcccacttggcagtacatcaagtgtatcatatgccaagtccgccccctattgacgtcaatgacggtaaatggcccgcctggcattatgcccagtacatgaccttacgggactttcctacttggcagtacatctacgtattagtcatcgctattaccatggtgatgcggttttggcagtacaccaatgggcgtggatagcggtttgactcacggggatttccaagtctccaccccattgacgtcaatgggagtttgttttggcaccaaaatcaacgggactttccaaaatgtcgtaataaccccgccccgttgacgcaaatgggcggtaggcgtgtacggtgggaggtctatataagcagagctcgtttagtgaaccgtcagatcactagtgcttctgacacaacagtctcgaacttaagctgcagaagttggtcgtgaggcactgggcaggtaagtatcaaggttacaagacaggtttaaggagaccaatagaaactgggcttgtcgagacagagaagactcttgcgtttctgataggcacctattggtcttactgacatccactttgcctttctctccacaggtgtccactcccagttcaatagtactgccaccatggagcaggataactccccaaggaagatccagtttactgtgccactgctggaaccccacctggacccagaagctgcagagcagatcagaagaaggaggccagacccagccaccctggtgctgacttctgatcagtcaagtccagagattgacgaggataggattccaaatccccacctgaagtccaccctggcctgataattcgaactgatcacttttttaataaaaggggcatttggaaaaaaaaaaaaaaggtagcagtcgacagatgaattctgcagatctgtggcttctagctgcccgggtggcatccctgtgacccctccccagtgcctctcctggccctggaagttgccactccagtgcccaccagccttgtcctaataaaattaagttgcatcattttgtctgactaggtgtccttctataatattatggggtggaggggggtggtatggagcaaggggcaagttgggaagacaacctgtagggcctgcggggtctattgggaaccaagctggagtgcagtggcacaatcttggctcactgcaatctccgcctcctgggttcaagcgattctcctgcctcagcctcccgagttgttgggattccaggcatgcatgaccaggctcagctaatttttgtttttttggtagagacggggtttcaccatattggccaggctggtctccaactcctaatctcaggtgatctacccaccttggcctcccaaattgctgggattacaggcgtgaaccactgctcccttccctgtccttctgattttaaaaaaaagagaaatgttctggcacctgcacttgcactggggacagcctattttgctagtttgttttgtttcgttttgttttgatggagagcgtatgttgtttaaacgcggccgcaggaacccctagtgatggagttggccactccctctctgcgcgctcgctcgctcactgaggccgggcgaccaaaggtcgcccgacgcccgggctttgcccgggcggcctcagtgagcgagcgagcgcgcagagagggagtggccaactggcgtaatagcgaagaggttaattaaggcgccctaggccgacccttagactctgtactcagttctataaacgagccattggatacgagatccgtagattgataagggacacggaatatccccggacgcaatagacaccggtggacagcttggtatcctgagcacagtcgcgcgtccgaatctagctctactttagaggccccggattctgatggtcgtagaccgcagaaccgattggggggatgagatctactagttatcagcacacaattgcccattatacgcgcgtataatggactattgtgtgctgatatagggataacagggtaattctagagctagcatatggatccatcgatttattctcttgtttgctccagactctcaggcaatgacctgatagcctttgtagagacctctcaaaaatagctaccctctccggcatgaatttatcagctagaacggttgaatatcatattgatggtgatttgactgtctccggcctttctcacccgtttgaatctttacctacacattactcaggcattgcatttaaaatatatgagggttctaaaaatttttatccttgcgttgaaataaaggcttctcccgcaaaagtattacagggtcataatgtttttggtacaaccgatttagctttatgctctgaggctttattgcttaattttgctaattctttgccttgcctgtatgatttattggatgttggaatcgcctgatgcggtattttctccttacgcatctgtgcggtatttcacaccgcatatggtgcactctcagtacaatctgctctgatgccgcatagttaagccagccccgacacccgccaacacccgctgacgcgccctgacgggcttgtctgctcccggcatccgcttacagacaagctgtgaccgtctccgggagctgcatgtgtcagaggttttcaccgtcatcaccgaaacgcgcgagacgaaagggcctcgtgatacgcctatttttataggttaatgtcatgataataatggtttcttagacgtcagggtaccgggccccccctcgaggtcgacggtatcgataagcttgatatcgaattcctcggggaaatgtgcgcggaacccctatttgtttatttttctaaatacattcaaatatgtatccgctcatgagacaataaccctgataaatgcttcaataatattgaaaaaggaagagtatgagccatattcaacgggaaacgtcgaggccgcgattaaattccaacatggatgctgatttatatgggtataaatgggctcgcgataatgtcgggcaatcaggtgcgacaatctatcgcttgtatgggaagcccgatgcgccagagttgtttctgaaacatggcaaaggtagcgttgccaatgatgttacagatgagatggtcagactaaactggctgacggaatttatgcctcttccgaccatcaagcattttatccgtactcctgatgatgcatggttactcaccactgcgatccccggaaaaacagcattccaggtattagaagaatatcctgattcaggtgaaaatattgttgatgcgctggcagtgttcctgcgccggttgcattcgattcctgtttgtaattgtccttttaacagcgatcgcgtatttcgtctcgctcaggcgcaatcacgaatgaataacggtttggttgatgcgagtgattttgatgacgagcgtaatggctggcctgttgaacaagtctggaaagaaatgcataaacttttgccattctcaccggattcagtcgtcactcatggtgatttctcacttgataaccttatttttgacgaggggaaattaataggttgtattgatgttggacgagtcggaatcgcagaccgataccaggatcttgccatcctatggaactgcctcggtgagttttctccttcattacagaaacggctttttcaaaaatatggtattgataatcctgatatgaataaattgcagtttcatttgatgctcgatgagtttttctaagcgtataatggtctagagctagcatatggatccatcgattccattatacgcctgtcagaccaagtttactcatatatactttagattgatttaaaacttcatttttaatttaaaaggatctaggtgaagatcctttttgataatctcatgaccaaaatcccttaacgtgagttttcgttccactgagcgtcagaccccgtagaaaagatcaaaggatcttcttgagatcctttttttctgcgcgtaatctgctgcttgcaaacaaaaaaaccaccgctaccagcggtggtttgtttgccggatcaagagctaccaactctttttccgaaggtaactggcttcagcagagcgcagataccaaatactgttcttctagtgtagccgtagttaggccaccacttcaagaactctgtagcaccgcctacatacctcgctctgctaatcctgttaccagtggctgctgccagtggcgataagtcgtgtcttaccgggttggactcaagacgatagttaccggataaggcgcagcggtcgggctgaacggggggttcgtgcacacagcccagcttggagcgaacgacctacaccgaactgagatacctacagcgtgagctatgagaaagcgccacgcttcccgaagggagaaaggcggacaggtatccggtaagcggcagggtcggaacaggagagcgcacgagggagcttccagggggaaacgcctggtatctttatagtcctgtcgggtttcgccacctctgacttgagcgtcgatttttgtgatgctcgtcaggggggcggagcctatggaaaaacgccagcaacgcggcctttttacggttcctggcctttttttcctgcagcccgggggatccaagttctagagcccgccaccgcggtggagctcgctcacatgttctttcctgcgttatcccctgattctgtggataaccgtattaccgcctttgagtgagctgataccgctcgccgcagccgaacgaccgagcgcagcgagtcagtgagcgaggaagcggaagagcgcccaatacgcaaaccgcctctccccgcgcgttggccgattcattaatg

SEQ ID NO: 371 - DNA, 6390 bp, Artificial Sequence
  Description of Artificial Sequence: Synthetic polynucleotide
  I-1c.v15 (I-I+B)
cagctggcgtaatagcgaagaggcccgcaccgatcgcccttcccaacagttgcgcagcctgaatggcgaatggcgattccgttgcaatggctggcggtaatattgttctggatattaccagcaaggccgatagtttgagttcttctactcaggcaagtgatgttattactaatcaaagaagtattgcgacaacggttaatttgcgtgatggacagactcttttactcggtggcctcactgattataaaaacacttctcaggattctggcgtaccgttcctgtctaaaatccctttaatcggcctcctgtttagctcccgctctgattctaacgaggaaagcacgttatacgtgctcgtcaaagcaaccatagtacgcgccctgtagcggcgcattaagcgcggcgggtgtggtggttacgcgcagcgtgaccgctacacttgccagcgccctagcgcccgctcctttcgctttcttcccttcctttctcgccacgttcgccggctttccccgtcaagctctaaatcgggggctccctttagggttccgatttagtgctttacggcacctcgaccccaaaaaacttgattagggtgatggttcacgtagtgggccatcgccctgatagacggtttttcgccctttgacgttggagtccacgttctttaatagtggactcttgttccaaactggaacaacactcaaccctatctcggtctattcttttgatttataagggattttgccgatttcggcctattggttaaaaaatgagctgatttaacaaaaatttaacgcgaattttaacaaaatattaacgcttacaatttaaatatttgcttatacaatcttcctgtttttggggcttttctgattatcaaccggggtacatatgattgacatgctagttttacgattaccgttcatcgtctagagctagcatatggatccatcgatttagggataacagggtaattatcagcacacaattgcccattatacgcgcgtataatggactattgtgtgctgatatctgtacacttaagggctagatcttagcttacgtcactagagggtccacgtttagtttttaagatccattgatctcctaaacgctgcaagattcgcaacctggtatacttagcctaggcgctaggtcctagtgcagcgggactttttttctaaagtcgttgagaggaggagtcgtcagaccagatagctttgatgtcctgatcggaaggatcgttggcccccctgcaggcagctgttaattaaccgattcattaatgcagcagctgcgcgctcgctcgctcactgaggccgcccgggcaaagcccgggcgtcgggcgacctttggtcgcccggcctcagtgagcgagcgagcgcgcagagagggagtggcgcgccacgcgtggatctaatagtaatcaattacggggtcattagttcatagcccatatatggagttccgcgttacataacttacggtaaatggcccgcctggctgaccgcccaacgacccccgcccattgacgtcaataatgacgtatgttcccatagtaacgccaatagggactttccattgacgtcaatgggtggagtatttacggtaaactgcccacttggcagtacatcaagtgtatcatatgccaagtccgccccctattgacgtcaatgacggtaaatggcccgcctggcattatgcccagtacatgaccttacgggactttcctacttggcagtacatctacgtattagtcatcgctattaccatggtgatgcggttttggcagtacaccaatgggcgtggatagcggtttgactcacggggatttccaagtctccaccccattgacgtcaatgggagtttgttttggcaccaaaatcaacgggactttccaaaatgtcgtaataaccccgccccgttgacgcaaatgggcggtaggcgtgtacggtgggaggtctatataagcagagctcgtttagtgaaccgtcagatcactagtgcttctgacacaacagtctcgaacttaagctgcagaagttggtcgtgaggcactgggcaggtaagtatcaaggttacaagacaggtttaaggagaccaatagaaactgggcttgtcgagacagagaagactcttgcgtttctgataggcacctattggtcttactgacatccactttgcctttctctccacaggtgtccactcccagttcaatagtactgccaccatggagcaggataattctcctagaaagattcagtttacagtgcctttgttggagcctcacttagatcctgaggctgctgagcagattagaagaagaagacctgatcctgctacattggtgttgacatctgatcagtcttctcctgagattgacgaggatagaattcctaatcctcacttgaagtctacattggcttgataattcgaactgatcacttttttaataaaaggggcatttggaaaaaaaaaaaaaaggtagcagtcgacagatgaattctgcagatctgtggcttctagctgcccgggtggcatccctgtgacccctccccagtgcctctcctggccctggaagttgccactccagtgcccaccagccttgtcctaataaaattaagttgcatcattttgtctgactaggtgtccttctataatattatggggtggaggggggtggtatggagcaaggggcaagttgggaagacaacctgtagggcctgcggggtctattgggaaccaagctggagtgcagtggcacaatcttggctcactgcaatctccgcctcctgggttcaagcgattctcctgcctcagcctcccgagttgttgggattccaggcatgcatgaccaggctcagctaatttttgtttttttggtagagacggggtttcaccatattggccaggctggtctccaactcctaatctcaggtgatctacccaccttggcctcccaaattgctgggattacaggcgtgaaccactgctcccttccctgtccttctgattttaaaaaaaagagaaatgttctggcacctgcacttgcactggggacagcctattttgctagtttgttttgtttcgttttgttttgatggagagcgtatgttgtttaaacgcggccgcaggaacccctagtgatggagttggccactccctctctgcgcgctcgctcgctcactgaggccgggcgaccaaaggtcgcccgacgcccgggctttgcccgggcggcctcagtgagcgagcgagcgcgcagagagggagtggccaactggcgtaatagcgaagaggttaattaaggcgccctaggccgacccttagactctgtactcagttctataaacgagccattggatacgagatccgtagattgataagggacacggaatatccccggacgcaatagacaccggtggacagcttggtatcctgagcacagtcgcgcgtccgaatctagctctactttagaggccccggattctgatggtcgtagaccgcagaaccgattggggggatgagatctactagttatcagcacacaattgcccattatacgcgcgtataatggactattgtgtgctgatatagggataacagggtaattctagagctagcatatggatccatcgatttattctcttgtttgctccagactctcaggcaatgacctgatagcctttgtagagacctctcaaaaatagctaccctctccggcatgaatttatcagctagaacggttgaatatcatattgatggtgatttgactgtctccggcctttctcacccgtttgaatctttacctacacattactcaggcattgcatttaaaatatatgagggttctaaaaatttttatccttgcgttgaaataaaggcttctcccgcaaaagtattacagggtcataatgtttttggtacaaccgatttagctttatgctctgaggctttattgcttaattttgctaattctttgccttgcctgtatgatttattggatgttggaatcgcctgatgcggtattttctccttacgcatctgtgcggtatttcacaccgcatatggtgcactctcagtacaatctgctctgatgccgcatagttaagccagccccgacacccgccaacacccgctgacgcgccctgacgggcttgtctgctcccggcatccgcttacagacaagctgtgaccgtctccgggagctgcatgtgtcagaggttttcaccgtcatcaccgaaacgcgcgagacgaaagggcctcgtgatacgcctatttttataggttaatgtcatgataataatggtttcttagacgtcagggtaccgggccccccctcgaggtcgacggtatcgataagcttgatatcgaattcctcggggaaatgtgcgcggaacccctatttgtttatttttctaaatacattcaaatatgtatccgctcatgagacaataaccctgataaatgcttcaataatattgaaaaaggaagagtatgagccatattcaacgggaaacgtcgaggccgcgattaaattccaacatggatgctgatttatatgggtataaatgggctcgcgataatgtcgggcaatcaggtgcgacaatctatcgcttgtatgggaagcccgatgcgccagagttgtttctgaaacatggcaaaggtagcgttgccaatgatgttacagatgagatggtcagactaaactggctgacggaatttatgcctcttccgaccatcaagcattttatccgtactcctgatgatgcatggttactcaccactgcgatccccggaaaaacagcattccaggtattagaagaatatcctgattcaggtgaaaatattgttgatgcgctggcagtgttcctgcgccggttgcattcgattcctgtttgtaattgtccttttaacagcgatcgcgtatttcgtctcgctcaggcgcaatcacgaatgaataacggtttggttgatgcgagtgattttgatgacgagcgtaatggctggcctgttgaacaagtctggaaagaaatgcataaacttttgccattctcaccggattcagtcgtcactcatggtgatttctcacttgataaccttatttttgacgaggggaaattaataggttgtattgatgttggacgagtcggaatcgcagaccgataccaggatcttgccatcctatggaactgcctcggtgagttttctccttcattacagaaacggctttttcaaaaatatggtattgataatcctgatatgaataaattgcagtttcatttgatgctcgatgagtttttctaagcgtataatggtctagagctagcatatggatccatcgattccattatacgcctgtcagaccaagtttactcatatatactttagattgatttaaaacttcatttttaatttaaaaggatctaggtgaagatcctttttgataatctcatgaccaaaatcccttaacgtgagttttcgttccactgagcgtcagaccccgtagaaaagatcaaaggatcttcttgagatcctttttttctgcgcgtaatctgctgcttgcaaacaaaaaaaccaccgctaccagcggtggtttgtttgccggatcaagagctaccaactctttttccgaaggtaactggcttcagcagagcgcagataccaaatactgttcttctagtgtagccgtagttaggccaccacttcaagaactctgtagcaccgcctacatacctcgctctgctaatcctgttaccagtggctgctgccagtggcgataagtcgtgtcttaccgggttggactcaagacgatagttaccggataaggcgcagcggtcgggctgaacggggggttcgtgcacacagcccagcttggagcgaacgacctacaccgaactgagatacctacagcgtgagctatgagaaagcgccacgcttcccgaagggagaaaggcggacaggtatccggtaagcggcagggtcggaacaggagagcgcacgagggagcttccagggggaaacgcctggtatctttatagtcctgtcgggtttcgccacctctgacttgagcgtcgatttttgtgatgctcgtcaggggggcggagcctatggaaaaacgccagcaacgcggcctttttacggttcctggcctttttttcctgcagcccgggggatccaagttctagagcccgccaccgcggtggagctcgctcacatgttctttcctgcgttatcccctgattctgtggataaccgtattaccgcctttgagtgagctgataccgctcgccgcagccgaacgaccgagcgcagcgagtcagtgagcgaggaagcggaagagcgcccaatacgcaaaccgcctctccccgcgcgttggccgattcattaatg

SEQ ID NO: 372 - DNA, 6390 bp, Artificial Sequence
  Description of Artificial Sequence: Synthetic polynucleotide
  I-1c.v16 (I-I+B)
cagctggcgtaatagcgaagaggcccgcaccgatcgcccttcccaacagttgcgcagcctgaatggcgaatggcgattccgttgcaatggctggcggtaatattgttctggatattaccagcaaggccgatagtttgagttcttctactcaggcaagtgatgttattactaatcaaagaagtattgcgacaacggttaatttgcgtgatggacagactcttttactcggtggcctcactgattataaaaacacttctcaggattctggcgtaccgttcctgtctaaaatccctttaatcggcctcctgtttagctcccgctctgattctaacgaggaaagcacgttatacgtgctcgtcaaagcaaccatagtacgcgccctgtagcggcgcattaagcgcggcgggtgtggtggttacgcgcagcgtgaccgctacacttgccagcgccctagcgcccgctcctttcgctttcttcccttcctttctcgccacgttcgccggctttccccgtcaagctctaaatcgggggctccctttagggttccgatttagtgctttacggcacctcgaccccaaaaaacttgattagggtgatggttcacgtagtgggccatcgccctgatagacggtttttcgccctttgacgttggagtccacgttctttaatagtggactcttgttccaaactggaacaacactcaaccctatctcggtctattcttttgatttataagggattttgccgatttcggcctattggttaaaaaatgagctgatttaacaaaaatttaacgcgaattttaacaaaatattaacgcttacaatttaaatatttgcttatacaatcttcctgtttttggggcttttctgattatcaaccggggtacatatgattgacatgctagttttacgattaccgttcatcgtctagagctagcatatggatccatcgatttagggataacagggtaattatcagcacacaattgcccattatacgcgcgtataatggactattgtgtgctgatatctgtacacttaagggctagatcttagcttacgtcactagagggtccacgtttagtttttaagatccattgatctcctaaacgctgcaagattcgcaacctggtatacttagcctaggcgctaggtcctagtgcagcgggactttttttctaaagtcgttgagaggaggagtcgtcagaccagatagctttgatgtcctgatcggaaggatcgttggcccccctgcaggcagctgttaattaaccgattcattaatgcagcagctgcgcgctcgctcgctcactgaggccgcccgggcaaagcccgggcgtcgggcgacctttggtcgcccggcctcagtgagcgagcgagcgcgcagagagggagtggcgcgccacgcgtggatctaatagtaatcaattacggggtcattagttcatagcccatatatggagttccgcgttacataacttacggtaaatggcccgcctggctgaccgcccaacgacccccgcccattgacgtcaataatgacgtatgttcccatagtaacgccaatagggactttccattgacgtcaatgggtggagtatttacggtaaactgcccacttggcagtacatcaagtgtatcatatgccaagtccgccccctattgacgtcaatgacggtaaatggcccgcctggcattatgcccagtacatgaccttacgggactttcctacttggcagtacatctacgtattagtcatcgctattaccatggtgatgcggttttggcagtacaccaatgggcgtggatagcggtttgactcacggggatttccaagtctccaccccattgacgtcaatgggagtttgttttggcaccaaaatcaacgggactttccaaaatgtcgtaataaccccgccccgttgacgcaaatgggcggtaggcgtgtacggtgggaggtctatataagcagagctcgtttagtgaaccgtcagatcactagtgcttctgacacaacagtctcgaacttaagctgcagaagttggtcgtgaggcactgggcaggtaagtatcaaggttacaagacaggtttaaggagaccaatagaaactgggcttgtcgagacagagaagactcttgcgtttctgataggcacctattggtcttactgacatccactttgcctttctctccacaggtgtccactcccagttcaatagtactgccaccatggagcaggataattcacctagaaagattcaatttactgtacctttgcttgagcctcacctagatcctgaagcagctgaacaaattaggaggagaaggccagatcctgctacactggttttaacatctgatcagtctagtccagaaattgacgaggatagaatacctaatcctcacttgaaatctacattggcctgataattcgaactgatcacttttttaataaaaggggcatttggaaaaaaaaaaaaaaggtagcagtcgacagatgaattctgcagatctgtggcttctagctgcccgggtggcatccctgtgacccctccccagtgcctctcctggccctggaagttgccactccagtgcccaccagccttgtcctaataaaattaagttgcatcattttgtctgactaggtgtccttctataatattatggggtggaggggggtggtatggagcaaggggcaagttgggaagacaacctgtagggcctgcggggtctattgggaaccaagctggagtgcagtggcacaatcttggctcactgcaatctccgcctcctgggttcaagcgattctcctgcctcagcctcccgagttgttgggattccaggcatgcatgaccaggctcagctaatttttgtttttttggtagagacggggtttcaccatattggccaggctggtctccaactcctaatctcaggtgatctacccaccttggcctcccaaattgctgggattacaggcgtgaaccactgctcccttccctgtccttctgattttaaaaaaaagagaaatgttctggcacctgcacttgcactggggacagcctattttgctagtttgttttgtttcgttttgttttgatggagagcgtatgttgtttaaacgcggccgcaggaacccctagtgatggagttggccactccctctctgcgcgctcgctcgctcactgaggccgggcgaccaaaggtcgcccgacgcccgggctttgcccgggcggcctcagtgagcgagcgagcgcgcagagagggagtggccaactggcgtaatagcgaagaggttaattaaggcgccctaggccgacccttagactctgtactcagttctataaacgagccattggatacgagatccgtagattgataagggacacggaatatccccggacgcaatagacaccggtggacagcttggtatcctgagcacagtcgcgcgtccgaatctagctctactttagaggccccggattctgatggtcgtagaccgcagaaccgattggggggatgagatctactagttatcagcacacaattgcccattatacgcgcgtataatggactattgtgtgctgatatagggataacagggtaattctagagctagcatatggatccatcgatttattctcttgtttgctccagactctcaggcaatgacctgatagcctttgtagagacctctcaaaaatagctaccctctccggcatgaatttatcagctagaacggttgaatatcatattgatggtgatttgactgtctccggcctttctcacccgtttgaatctttacctacacattactcaggcattgcatttaaaatatatgagggttctaaaaatttttatccttgcgttgaaataaaggcttctcccgcaaaagtattacagggtcataatgtttttggtacaaccgatttagctttatgctctgaggctttattgcttaattttgctaattctttgccttgcctgtatgatttattggatgttggaatcgcctgatgcggtattttctccttacgcatctgtgcggtatttcacaccgcatatggtgcactctcagtacaatctgctctgatgccgcatagttaagccagccccgacacccgccaacacccgctgacgcgccctgacgggcttgtctgctcccggcatccgcttacagacaagctgtgaccgtctccgggagctgcatgtgtcagaggttttcaccgtcatcaccgaaacgcgcgagacgaaagggcctcgtgatacgcctatttttataggttaatgtcatgataataatggtttcttagacgtcagggtaccgggccccccctcgaggtcgacggtatcgataagcttgatatcgaattcctcggggaaatgtgcgcggaacccctatttgtttatttttctaaatacattcaaatatgtatccgctcatgagacaataaccctgataaatgcttcaataatattgaaaaaggaagagtatgagccatattcaacgggaaacgtcgaggccgcgattaaattccaacatggatgctgatttatatgggtataaatgggctcgcgataatgtcgggcaatcaggtgcgacaatctatcgcttgtatgggaagcccgatgcgccagagttgtttctgaaacatggcaaaggtagcgttgccaatgatgttacagatgagatggtcagactaaactggctgacggaatttatgcctcttccgaccatcaagcattttatccgtactcctgatgatgcatggttactcaccactgcgatccccggaaaaacagcattccaggtattagaagaatatcctgattcaggtgaaaatattgttgatgcgctggcagtgttcctgcgccggttgcattcgattcctgtttgtaattgtccttttaacagcgatcgcgtatttcgtctcgctcaggcgcaatcacgaatgaataacggtttggttgatgcgagtgattttgatgacgagcgtaatggctggcctgttgaacaagtctggaaagaaatgcataaacttttgccattctcaccggattcagtcgtcactcatggtgatttctcacttgataaccttatttttgacgaggggaaattaataggttgtattgatgttggacgagtcggaatcgcagaccgataccaggatcttgccatcctatggaactgcctcggtgagttttctccttcattacagaaacggctttttcaaaaatatggtattgataatcctgatatgaataaattgcagtttcatttgatgctcgatgagtttttctaagcgtataatggtctagagctagcatatggatccatcgattccattatacgcctgtcagaccaagtttactcatatatactttagattgatttaaaacttcatttttaatttaaaaggatctaggtgaagatcctttttgataatctcatgaccaaaatcccttaacgtgagttttcgttccactgagcgtcagaccccgtagaaaagatcaaaggatcttcttgagatcctttttttctgcgcgtaatctgctgcttgcaaacaaaaaaaccaccgctaccagcggtggtttgtttgccggatcaagagctaccaactctttttccgaaggtaactggcttcagcagagcgcagataccaaatactgttcttctagtgtagccgtagttaggccaccacttcaagaactctgtagcaccgcctacatacctcgctctgctaatcctgttaccagtggctgctgccagtggcgataagtcgtgtcttaccgggttggactcaagacgatagttaccggataaggcgcagcggtcgggctgaacggggggttcgtgcacacagcccagcttggagcgaacgacctacaccgaactgagatacctacagcgtgagctatgagaaagcgccacgcttcccgaagggagaaaggcggacaggtatccggtaagcggcagggtcggaacaggagagcgcacgagggagcttccagggggaaacgcctggtatctttatagtcctgtcgggtttcgccacctctgacttgagcgtcgatttttgtgatgctcgtcaggggggcggagcctatggaaaaacgccagcaacgcggcctttttacggttcctggcctttttttcctgcagcccgggggatccaagttctagagcccgccaccgcggtggagctcgctcacatgttctttcctgcgttatcccctgattctgtggataaccgtattaccgcctttgagtgagctgataccgctcgccgcagccgaacgaccgagcgcagcgagtcagtgagcgaggaagcggaagagcgcccaatacgcaaaccgcctctccccgcgcgttggccgattcattaatg

SEQ ID NO: 373 - DNA, 6390 bp, Artificial Sequence
  Description of Artificial Sequence: Synthetic polynucleotide
  I-1c.v17 (I-I+B)
cagctggcgtaatagcgaagaggcccgcaccgatcgcccttcccaacagttgcgcagcctgaatggcgaatggcgattccgttgcaatggctggcggtaatattgttctggatattaccagcaaggccgatagtttgagttcttctactcaggcaagtgatgttattactaatcaaagaagtattgcgacaacggttaatttgcgtgatggacagactcttttactcggtggcctcactgattataaaaacacttctcaggattctggcgtaccgttcctgtctaaaatccctttaatcggcctcctgtttagctcccgctctgattctaacgaggaaagcacgttatacgtgctcgtcaaagcaaccatagtacgcgccctgtagcggcgcattaagcgcggcgggtgtggtggttacgcgcagcgtgaccgctacacttgccagcgccctagcgcccgctcctttcgctttcttcccttcctttctcgccacgttcgccggctttccccgtcaagctctaaatcgggggctccctttagggttccgatttagtgctttacggcacctcgaccccaaaaaacttgattagggtgatggttcacgtagtgggccatcgccctgatagacggtttttcgccctttgacgttggagtccacgttctttaatagtggactcttgttccaaactggaacaacactcaaccctatctcggtctattcttttgatttataagggattttgccgatttcggcctattggttaaaaaatgagctgatttaacaaaaatttaacgcgaattttaacaaaatattaacgcttacaatttaaatatttgcttatacaatcttcctgtttttggggcttttctgattatcaaccggggtacatatgattgacatgctagttttacgattaccgttcatcgtctagagctagcatatggatccatcgatttagggataacagggtaattatcagcacacaattgcccattatacgcgcgtataatggactattgtgtgctgatatctgtacacttaagggctagatcttagcttacgtcactagagggtccacgtttagtttttaagatccattgatctcctaaacgctgcaagattcgcaacctggtatacttagcctaggcgctaggtcctagtgcagcgggactttttttctaaagtcgttgagaggaggagtcgtcagaccagatagctttgatgtcctgatcggaaggatcgttggcccccctgcaggcagctgttaattaaccgattcattaatgcagcagctgcgcgctcgctcgctcactgaggccgcccgggcaaagcccgggcgtcgggcgacctttggtcgcccggcctcagtgagcgagcgagcgcgcagagagggagtggcgcgccacgcgtggatctaatagtaatcaattacggggtcattagttcatagcccatatatggagttccgcgttacataacttacggtaaatggcccgcctggctgaccgcccaacgacccccgcccattgacgtcaataatgacgtatgttcccatagtaacgccaatagggactttccattgacgtcaatgggtggagtatttacggtaaactgcccacttggcagtacatcaagtgtatcatatgccaagtccgccccctattgacgtcaatgacggtaaatggcccgcctggcattatgcccagtacatgaccttacgggactttcctacttggcagtacatctacgtattagtcatcgctattaccatggtgatgcggttttggcagtacaccaatgggcgtggatagcggtttgactcacggggatttccaagtctccaccccattgacgtcaatgggagtttgttttggcaccaaaatcaacgggactttccaaaatgtcgtaataaccccgccccgttgacgcaaatgggcggtaggcgtgtacggtgggaggtctatataagcagagctcgtttagtgaaccgtcagatcactagtgcttctgacacaacagtctcgaacttaagctgcagaagttggtcgtgaggcactgggcaggtaagtatcaaggttacaagacaggtttaaggagaccaatagaaactgggcttgtcgagacagagaagactcttgcgtttctgataggcacctattggtcttactgacatccactttgcctttctctccacaggtgtccactcccagttcaatagtactgccaccatggaacaagataatagtccaaggaaaattcaatttactgttccactgctggaaccacaccttgatccagaagcagcagaacaaattaggaggaggaggccagatccagcaactctggttctgactagtgatcaaagtagtccagaaattgacgaagataggattccaaatccacacctgaaaagcactctggcctgataattcgaactgatcacttttttaataaaaggggcatttggaaaaaaaaaaaaaaggtagcagtcgacagatgaattctgcagatctgtggcttctagctgcccgggtggcatccctgtgacccctccccagtgcctctcctggccctggaagttgccactccagtgcccaccagccttgtcctaataaaattaagttgcatcattttgtctgactaggtgtccttctataatattatggggtggaggggggtggtatggagcaaggggcaagttgggaagacaacctgtagggcctgcggggtctattgggaaccaagctggagtgcagtggcacaatcttggctcactgcaatctccgcctcctgggttcaagcgattctcctgcctcagcctcccgagttgttgggattccaggcatgcatgaccaggctcagctaatttttgtttttttggtagagacggggtttcaccatattggccaggctggtctccaactcctaatctcaggtgatctacccaccttggcctcccaaattgctgggattacaggcgtgaaccactgctcccttccctgtccttctgattttaaaaaaaagagaaatgttctggcacctgcacttgcactggggacagcctattttgctagtttgttttgtttcgttttgttttgatggagagcgtatgttgtttaaacgcggccgcaggaacccctagtgatggagttggccactccctctctgcgcgctcgctcgctcactgaggccgggcgaccaaaggtcgcccgacgcccgggctttgcccgggcggcctcagtgagcgagcgagcgcgcagagagggagtggccaactggcgtaatagcgaagaggttaattaaggcgccctaggccgacccttagactctgtactcagttctataaacgagccattggatacgagatccgtagattgataagggacacggaatatccccggacgcaatagacaccggtggacagcttggtatcctgagcacagtcgcgcgtccgaatctagctctactttagaggccccggattctgatggtcgtagaccgcagaaccgattggggggatgagatctactagttatcagcacacaattgcccattatacgcgcgtataatggactattgtgtgctgatatagggataacagggtaattctagagctagcatatggatccatcgatttattctcttgtttgctccagactctcaggcaatgacctgatagcctttgtagagacctctcaaaaatagctaccctctccggcatgaatttatcagctagaacggttgaatatcatattgatggtgatttgactgtctccggcctttctcacccgtttgaatctttacctacacattactcaggcattgcatttaaaatatatgagggttctaaaaatttttatccttgcgttgaaataaaggcttctcccgcaaaagtattacagggtcataatgtttttggtacaaccgatttagctttatgctctgaggctttattgcttaattttgctaattctttgccttgcctgtatgatttattggatgttggaatcgcctgatgcggtattttctccttacgcatctgtgcggtatttcacaccgcatatggtgcactctcagtacaatctgctctgatgccgcatagttaagccagccccgacacccgccaacacccgctgacgcgccctgacgggcttgtctgctcccggcatccgcttacagacaagctgtgaccgtctccgggagctgcatgtgtcagaggttttcaccgtcatcaccgaaacgcgcgagacgaaagggcctcgtgatacgcctatttttataggttaatgtcatgataataatggtttcttagacgtcagggtaccgggccccccctcgaggtcgacggtatcgataagcttgatatcgaattcctcggggaaatgtgcgcggaacccctatttgtttatttttctaaatacattcaaatatgtatccgctcatgagacaataaccctgataaatgcttcaataatattgaaaaaggaagagtatgagccatattcaacgggaaacgtcgaggccgcgattaaattccaacatggatgctgatttatatgggtataaatgggctcgcgataatgtcgggcaatcaggtgcgacaatctatcgcttgtatgggaagcccgatgcgccagagttgtttctgaaacatggcaaaggtagcgttgccaatgatgttacagatgagatggtcagactaaactggctgacggaatttatgcctcttccgaccatcaagcattttatccgtactcctgatgatgcatggttactcaccactgcgatccccggaaaaacagcattccaggtattagaagaatatcctgattcaggtgaaaatattgttgatgcgctggcagtgttcctgcgccggttgcattcgattcctgtttgtaattgtccttttaacagcgatcgcgtatttcgtctcgctcaggcgcaatcacgaatgaataacggtttggttgatgcgagtgattttgatgacgagcgtaatggctggcctgttgaacaagtctggaaagaaatgcataaacttttgccattctcaccggattcagtcgtcactcatggtgatttctcacttgataaccttatttttgacgaggggaaattaataggttgtattgatgttggacgagtcggaatcgcagaccgataccaggatcttgccatcctatggaactgcctcggtgagttttctccttcattacagaaacggctttttcaaaaatatggtattgataatcctgatatgaataaattgcagtttcatttgatgctcgatgagtttttctaagcgtataatggtctagagctagcatatggatccatcgattccattatacgcctgtcagaccaagtttactcatatatactttagattgatttaaaacttcatttttaatttaaaaggatctaggtgaagatcctttttgataatctcatgaccaaaatcccttaacgtgagttttcgttccactgagcgtcagaccccgtagaaaagatcaaaggatcttcttgagatcctttttttctgcgcgtaatctgctgcttgcaaacaaaaaaaccaccgctaccagcggtggtttgtttgccggatcaagagctaccaactctttttccgaaggtaactggcttcagcagagcgcagataccaaatactgttcttctagtgtagccgtagttaggccaccacttcaagaactctgtagcaccgcctacatacctcgctctgctaatcctgttaccagtggctgctgccagtggcgataagtcgtgtcttaccgggttggactcaagacgatagttaccggataaggcgcagcggtcgggctgaacggggggttcgtgcacacagcccagcttggagcgaacgacctacaccgaactgagatacctacagcgtgagctatgagaaagcgccacgcttcccgaagggagaaaggcggacaggtatccggtaagcggcagggtcggaacaggagagcgcacgagggagcttccagggggaaacgcctggtatctttatagtcctgtcgggtttcgccacctctgacttgagcgtcgatttttgtgatgctcgtcaggggggcggagcctatggaaaaacgccagcaacgcggcctttttacggttcctggcctttttttcctgcagcccgggggatccaagttctagagcccgccaccgcggtggagctcgctcacatgttctttcctgcgttatcccctgattctgtggataaccgtattaccgcctttgagtgagctgataccgctcgccgcagccgaacgaccgagcgcagcgagtcagtgagcgaggaagcggaagagcgcccaatacgcaaaccgcctctccccgcgcgttggccgattcattaatg

SEQ ID NO: 374 - DNA, 6390 bp, Artificial Sequence
  Description of Artificial Sequence: Synthetic polynucleotide
  I-1c.v18 (I-I+B)
cagctggcgtaatagcgaagaggcccgcaccgatcgcccttcccaacagttgcgcagcctgaatggcgaatggcgattccgttgcaatggctggcggtaatattgttctggatattaccagcaaggccgatagtttgagttcttctactcaggcaagtgatgttattactaatcaaagaagtattgcgacaacggttaatttgcgtgatggacagactcttttactcggtggcctcactgattataaaaacacttctcaggattctggcgtaccgttcctgtctaaaatccctttaatcggcctcctgtttagctcccgctctgattctaacgaggaaagcacgttatacgtgctcgtcaaagcaaccatagtacgcgccctgtagcggcgcattaagcgcggcgggtgtggtggttacgcgcagcgtgaccgctacacttgccagcgccctagcgcccgctcctttcgctttcttcccttcctttctcgccacgttcgccggctttccccgtcaagctctaaatcgggggctccctttagggttccgatttagtgctttacggcacctcgaccccaaaaaacttgattagggtgatggttcacgtagtgggccatcgccctgatagacggtttttcgccctttgacgttggagtccacgttctttaatagtggactcttgttccaaactggaacaacactcaaccctatctcggtctattcttttgatttataagggattttgccgatttcggcctattggttaaaaaatgagctgatttaacaaaaatttaacgcgaattttaacaaaatattaacgcttacaatttaaatatttgcttatacaatcttcctgtttttggggcttttctgattatcaaccggggtacatatgattgacatgctagttttacgattaccgttcatcgtctagagctagcatatggatccatcgatttagggataacagggtaattatcagcacacaattgcccattatacgcgcgtataatggactattgtgtgctgatatctgtacacttaagggctagatcttagcttacgtcactagagggtccacgtttagtttttaagatccattgatctcctaaacgctgcaagattcgcaacctggtatacttagcctaggcgctaggtcctagtgcagcgggactttttttctaaagtcgttgagaggaggagtcgtcagaccagatagctttgatgtcctgatcggaaggatcgttggcccccctgcaggcagctgttaattaaccgattcattaatgcagcagctgcgcgctcgctcgctcactgaggccgcccgggcaaagcccgggcgtcgggcgacctttggtcgcccggcctcagtgagcgagcgagcgcgcagagagggagtggcgcgccacgcgtggatctaatagtaatcaattacggggtcattagttcatagcccatatatggagttccgcgttacataacttacggtaaatggcccgcctggctgaccgcccaacgacccccgcccattgacgtcaataatgacgtatgttcccatagtaacgccaatagggactttccattgacgtcaatgggtggagtatttacggtaaactgcccacttggcagtacatcaagtgtatcatatgccaagtccgccccctattgacgtcaatgacggtaaatggcccgcctggcattatgcccagtacatgaccttacgggactttcctacttggcagtacatctacgtattagtcatcgctattaccatggtgatgcggttttggcagtacaccaatgggcgtggatagcggtttgactcacggggatttccaagtctccaccccattgacgtcaatgggagtttgttttggcaccaaaatcaacgggactttccaaaatgtcgtaataaccccgccccgttgacgcaaatgggcggtaggcgtgtacggtgggaggtctatataagcagagctcgtttagtgaaccgtcagatcactagtgcttctgacacaacagtctcgaacttaagctgcagaagttggtcgtgaggcactgggcaggtaagtatcaaggttacaagacaggtttaaggagaccaatagaaactgggcttgtcgagacagagaagactcttgcgtttctgataggcacctattggtcttactgacatccactttgcctttctctccacaggtgtccactcccagttcaatagtactgccaccatggagcaagataattctccaagaaagatacagtttactgttcctctacttgaacctcatcttgatccagaagcagctgaacaaattaggagaaggaggccagatcctgctactttagtgctgacatcagatcaaagtagtccagaaattgacgaggataggatacctaatccacacctaaaatcaactttagcctgataattcgaactgatcacttttttaataaaaggggcatttggaaaaaaaaaaaaaaggtagcagtcgacagatgaattctgcagatctgtggcttctagctgcccgggtggcatccctgtgacccctccccagtgcctctcctggccctggaagttgccactccagtgcccaccagccttgtcctaataaaattaagttgcatcattttgtctgactaggtgtccttctataatattatggggtggaggggggtggtatggagcaaggggcaagttgggaagacaacctgtagggcctgcggggtctattgggaaccaagctggagtgcagtggcacaatcttggctcactgcaatctccgcctcctgggttcaagcgattctcctgcctcagcctcccgagttgttgggattccaggcatgcatgaccaggctcagctaatttttgtttttttggtagagacggggtttcaccatattggccaggctggtctccaactcctaatctcaggtgatctacccaccttggcctcccaaattgctgggattacaggcgtgaaccactgctcccttccctgtccttctgattttaaaaaaaagagaaatgttctggcacctgcacttgcactggggacagcctattttgctagtttgttttgtttcgttttgttttgatggagagcgtatgttgtttaaacgcggccgcaggaacccctagtgatggagttggccactccctctctgcgcgctcgctcgctcactgaggccgggcgaccaaaggtcgcccgacgcccgggctttgcccgggcggcctcagtgagcgagcgagcgcgcagagagggagtggccaactggcgtaatagcgaagaggttaattaaggcgccctaggccgacccttagactctgtactcagttctataaacgagccattggatacgagatccgtagattgataagggacacggaatatccccggacgcaatagacaccggtggacagcttggtatcctgagcacagtcgcgcgtccgaatctagctctactttagaggccccggattctgatggtcgtagaccgcagaaccgattggggggatgagatctactagttatcagcacacaattgcccattatacgcgcgtataatggactattgtgtgctgatatagggataacagggtaattctagagctagcatatggatccatcgatttattctcttgtttgctccagactctcaggcaatgacctgatagcctttgtagagacctctcaaaaatagctaccctctccggcatgaatttatcagctagaacggttgaatatcatattgatggtgatttgactgtctccggcctttctcacccgtttgaatctttacctacacattactcaggcattgcatttaaaatatatgagggttctaaaaatttttatccttgcgttgaaataaaggcttctcccgcaaaagtattacagggtcataatgtttttggtacaaccgatttagctttatgctctgaggctttattgcttaattttgctaattctttgccttgcctgtatgatttattggatgttggaatcgcctgatgcggtattttctccttacgcatctgtgcggtatttcacaccgcatatggtgcactctcagtacaatctgctctgatgccgcatagttaagccagccccgacacccgccaacacccgctgacgcgccctgacgggcttgtctgctcccggcatccgcttacagacaagctgtgaccgtctccgggagctgcatgtgtcagaggttttcaccgtcatcaccgaaacgcgcgagacgaaagggcctcgtgatacgcctatttttataggttaatgtcatgataataatggtttcttagacgtcagggtaccgggccccccctcgaggtcgacggtatcgataagcttgatatcgaattcctcggggaaatgtgcgcggaacccctatttgtttatttttctaaatacattcaaatatgtatccgctcatgagacaataaccctgataaatgcttcaataatattgaaaaaggaagagtatgagccatattcaacgggaaacgtcgaggccgcgattaaattccaacatggatgctgatttatatgggtataaatgggctcgcgataatgtcgggcaatcaggtgcgacaatctatcgcttgtatgggaagcccgatgcgccagagttgtttctgaaacatggcaaaggtagcgttgccaatgatgttacagatgagatggtcagactaaactggctgacggaatttatgcctcttccgaccatcaagcattttatccgtactcctgatgatgcatggttactcaccactgcgatccccggaaaaacagcattccaggtattagaagaatatcctgattcaggtgaaaatattgttgatgcgctggcagtgttcctgcgccggttgcattcgattcctgtttgtaattgtccttttaacagcgatcgcgtatttcgtctcgctcaggcgcaatcacgaatgaataacggtttggttgatgcgagtgattttgatgacgagcgtaatggctggcctgttgaacaagtctggaaagaaatgcataaacttttgccattctcaccggattcagtcgtcactcatggtgatttctcacttgataaccttatttttgacgaggggaaattaataggttgtattgatgttggacgagtcggaatcgcagaccgataccaggatcttgccatcctatggaactgcctcggtgagttttctccttcattacagaaacggctttttcaaaaatatggtattgataatcctgatatgaataaattgcagtttcatttgatgctcgatgagtttttctaagcgtataatggtctagagctagcatatggatccatcgattccattatacgcctgtcagaccaagtttactcatatatactttagattgatttaaaacttcatttttaatttaaaaggatctaggtgaagatcctttttgataatctcatgaccaaaatcccttaacgtgagttttcgttccactgagcgtcagaccccgtagaaaagatcaaaggatcttcttgagatcctttttttctgcgcgtaatctgctgcttgcaaacaaaaaaaccaccgctaccagcggtggtttgtttgccggatcaagagctaccaactctttttccgaaggtaactggcttcagcagagcgcagataccaaatactgttcttctagtgtagccgtagttaggccaccacttcaagaactctgtagcaccgcctacatacctcgctctgctaatcctgttaccagtggctgctgccagtggcgataagtcgtgtcttaccgggttggactcaagacgatagttaccggataaggcgcagcggtcgggctgaacggggggttcgtgcacacagcccagcttggagcgaacgacctacaccgaactgagatacctacagcgtgagctatgagaaagcgccacgcttcccgaagggagaaaggcggacaggtatccggtaagcggcagggtcggaacaggagagcgcacgagggagcttccagggggaaacgcctggtatctttatagtcctgtcgggtttcgccacctctgacttgagcgtcgatttttgtgatgctcgtcaggggggcggagcctatggaaaaacgccagcaacgcggcctttttacggttcctggcctttttttcctgcagcccgggggatccaagttctagagcccgccaccgcggtggagctcgctcacatgttctttcctgcgttatcccctgattctgtggataaccgtattaccgcctttgagtgagctgataccgctcgccgcagccgaacgaccgagcgcagcgagtcagtgagcgaggaagcggaagagcgcccaatacgcaaaccgcctctccccgcgcgttggccgattcattaatg

SEQ ID NO: 375 - DNA, 6390 bp, Artificial Sequence
  Description of Artificial Sequence: Synthetic polynucleotide
  I-1c.v19 (I-I+B)
cagctggcgtaatagcgaagaggcccgcaccgatcgcccttcccaacagttgcgcagcctgaatggcgaatggcgattccgttgcaatggctggcggtaatattgttctggatattaccagcaaggccgatagtttgagttcttctactcaggcaagtgatgttattactaatcaaagaagtattgcgacaacggttaatttgcgtgatggacagactcttttactcggtggcctcactgattataaaaacacttctcaggattctggcgtaccgttcctgtctaaaatccctttaatcggcctcctgtttagctcccgctctgattctaacgaggaaagcacgttatacgtgctcgtcaaagcaaccatagtacgcgccctgtagcggcgcattaagcgcggcgggtgtggtggttacgcgcagcgtgaccgctacacttgccagcgccctagcgcccgctcctttcgctttcttcccttcctttctcgccacgttcgccggctttccccgtcaagctctaaatcgggggctccctttagggttccgatttagtgctttacggcacctcgaccccaaaaaacttgattagggtgatggttcacgtagtgggccatcgccctgatagacggtttttcgccctttgacgttggagtccacgttctttaatagtggactcttgttccaaactggaacaacactcaaccctatctcggtctattcttttgatttataagggattttgccgatttcggcctattggttaaaaaatgagctgatttaacaaaaatttaacgcgaattttaacaaaatattaacgcttacaatttaaatatttgcttatacaatcttcctgtttttggggcttttctgattatcaaccggggtacatatgattgacatgctagttttacgattaccgttcatcgtctagagctagcatatggatccatcgatttagggataacagggtaattatcagcacacaattgcccattatacgcgcgtataatggactattgtgtgctgatatctgtacacttaagggctagatcttagcttacgtcactagagggtccacgtttagtttttaagatccattgatctcctaaacgctgcaagattcgcaacctggtatacttagcctaggcgctaggtcctagtgcagcgggactttttttctaaagtcgttgagaggaggagtcgtcagaccagatagctttgatgtcctgatcggaaggatcgttggcccccctgcaggcagctgttaattaaccgattcattaatgcagcagctgcgcgctcgctcgctcactgaggccgcccgggcaaagcccgggcgtcgggcgacctttggtcgcccggcctcagtgagcgagcgagcgcgcagagagggagtggcgcgccacgcgtggatctaatagtaatcaattacggggtcattagttcatagcccatatatggagttccgcgttacataacttacggtaaatggcccgcctggctgaccgcccaacgacccccgcccattgacgtcaataatgacgtatgttcccatagtaacgccaatagggactttccattgacgtcaatgggtggagtatttacggtaaactgcccacttggcagtacatcaagtgtatcatatgccaagtccgccccctattgacgtcaatgacggtaaatggcccgcctggcattatgcccagtacatgaccttacgggactttcctacttggcagtacatctacgtattagtcatcgctattaccatggtgatgcggttttggcagtacaccaatgggcgtggatagcggtttgactcacggggatttccaagtctccaccccattgacgtcaatgggagtttgttttggcaccaaaatcaacgggactttccaaaatgtcgtaataaccccgccccgttgacgcaaatgggcggtaggcgtgtacggtgggaggtctatataagcagagctcgtttagtgaaccgtcagatcactagtgcttctgacacaacagtctcgaacttaagctgcagaagttggtcgtgaggcactgggcaggtaagtatcaaggttacaagacaggtttaaggagaccaatagaaactgggcttgtcgagacagagaagactcttgcgtttctgataggcacctattggtcttactgacatccactttgcctttctctccacaggtgtccactcccagttcaatagtactgccaccatggagcaggacaacagccccaggaagatccagttcactgtgcccctgctggagccccacctggaccctgaggcagcagagcagatcaggaggaggaggcctgaccctgccaccctggtgctgacctctgaccagagcagccctgagattgacgaggacaggattcccaacccccacctgaagagcaccctggcctgataattcgaactgatcacttttttaataaaaggggcatttggaaaaaaaaaaaaaaggtagcagtcgacagatgaattctgcagatctgtggcttctagctgcccgggtggcatccctgtgacccctccccagtgcctctcctggccctggaagttgccactccagtgcccaccagccttgtcctaataaaattaagttgcatcattttgtctgactaggtgtccttctataatattatggggtggaggggggtggtatggagcaaggggcaagttgggaagacaacctgtagggcctgcggggtctattgggaaccaagctggagtgcagtggcacaatcttggctcactgcaatctccgcctcctgggttcaagcgattctcctgcctcagcctcccgagttgttgggattccaggcatgcatgaccaggctcagctaatttttgtttttttggtagagacggggtttcaccatattggccaggctggtctccaactcctaatctcaggtgatctacccaccttggcctcccaaattgctgggattacaggcgtgaaccactgctcccttccctgtccttctgattttaaaaaaaagagaaatgttctggcacctgcacttgcactggggacagcctattttgctagtttgttttgtttcgttttgttttgatggagagcgtatgttgtttaaacgcggccgcaggaacccctagtgatggagttggccactccctctctgcgcgctcgctcgctcactgaggccgggcgaccaaaggtcgcccgacgcccgggctttgcccgggcggcctcagtgagcgagcgagcgcgcagagagggagtggccaactggcgtaatagcgaagaggttaattaaggcgccctaggccgacccttagactctgtactcagttctataaacgagccattggatacgagatccgtagattgataagggacacggaatatccccggacgcaatagacaccggtggacagcttggtatcctgagcacagtcgcgcgtccgaatctagctctactttagaggccccggattctgatggtcgtagaccgcagaaccgattggggggatgagatctactagttatcagcacacaattgcccattatacgcgcgtataatggactattgtgtgctgatatagggataacagggtaattctagagctagcatatggatccatcgatttattctcttgtttgctccagactctcaggcaatgacctgatagcctttgtagagacctctcaaaaatagctaccctctccggcatgaatttatcagctagaacggttgaatatcatattgatggtgatttgactgtctccggcctttctcacccgtttgaatctttacctacacattactcaggcattgcatttaaaatatatgagggttctaaaaatttttatccttgcgttgaaataaaggcttctcccgcaaaagtattacagggtcataatgtttttggtacaaccgatttagctttatgctctgaggctttattgcttaattttgctaattctttgccttgcctgtatgatttattggatgttggaatcgcctgatgcggtattttctccttacgcatctgtgcggtatttcacaccgcatatggtgcactctcagtacaatctgctctgatgccgcatagttaagccagccccgacacccgccaacacccgctgacgcgccctgacgggcttgtctgctcccggcatccgcttacagacaagctgtgaccgtctccgggagctgcatgtgtcagaggttttcaccgtcatcaccgaaacgcgcgagacgaaagggcctcgtgatacgcctatttttataggttaatgtcatgataataatggtttcttagacgtcagggtaccgggccccccctcgaggtcgacggtatcgataagcttgatatcgaattcctcggggaaatgtgcgcggaacccctatttgtttatttttctaaatacattcaaatatgtatccgctcatgagacaataaccctgataaatgcttcaataatattgaaaaaggaagagtatgagccatattcaacgggaaacgtcgaggccgcgattaaattccaacatggatgctgatttatatgggtataaatgggctcgcgataatgtcgggcaatcaggtgcgacaatctatcgcttgtatgggaagcccgatgcgccagagttgtttctgaaacatggcaaaggtagcgttgccaatgatgttacagatgagatggtcagactaaactggctgacggaatttatgcctcttccgaccatcaagcattttatccgtactcctgatgatgcatggttactcaccactgcgatccccggaaaaacagcattccaggtattagaagaatatcctgattcaggtgaaaatattgttgatgcgctggcagtgttcctgcgccggttgcattcgattcctgtttgtaattgtccttttaacagcgatcgcgtatttcgtctcgctcaggcgcaatcacgaatgaataacggtttggttgatgcgagtgattttgatgacgagcgtaatggctggcctgttgaacaagtctggaaagaaatgcataaacttttgccattctcaccggattcagtcgtcactcatggtgatttctcacttgataaccttatttttgacgaggggaaattaataggttgtattgatgttggacgagtcggaatcgcagaccgataccaggatcttgccatcctatggaactgcctcggtgagttttctccttcattacagaaacggctttttcaaaaatatggtattgataatcctgatatgaataaattgcagtttcatttgatgctcgatgagtttttctaagcgtataatggtctagagctagcatatggatccatcgattccattatacgcctgtcagaccaagtttactcatatatactttagattgatttaaaacttcatttttaatttaaaaggatctaggtgaagatcctttttgataatctcatgaccaaaatcccttaacgtgagttttcgttccactgagcgtcagaccccgtagaaaagatcaaaggatcttcttgagatcctttttttctgcgcgtaatctgctgcttgcaaacaaaaaaaccaccgctaccagcggtggtttgtttgccggatcaagagctaccaactctttttccgaaggtaactggcttcagcagagcgcagataccaaatactgttcttctagtgtagccgtagttaggccaccacttcaagaactctgtagcaccgcctacatacctcgctctgctaatcctgttaccagtggctgctgccagtggcgataagtcgtgtcttaccgggttggactcaagacgatagttaccggataaggcgcagcggtcgggctgaacggggggttcgtgcacacagcccagcttggagcgaacgacctacaccgaactgagatacctacagcgtgagctatgagaaagcgccacgcttcccgaagggagaaaggcggacaggtatccggtaagcggcagggtcggaacaggagagcgcacgagggagcttccagggggaaacgcctggtatctttatagtcctgtcgggtttcgccacctctgacttgagcgtcgatttttgtgatgctcgtcaggggggcggagcctatggaaaaacgccagcaacgcggcctttttacggttcctggcctttttttcctgcagcccgggggatccaagttctagagcccgccaccgcggtggagctcgctcacatgttctttcctgcgttatcccctgattctgtggataaccgtattaccgcctttgagtgagctgataccgctcgccgcagccgaacgaccgagcgcagcgagtcagtgagcgaggaagcggaagagcgcccaatacgcaaaccgcctctccccgcgcgttggccgattcattaatg

SEQ ID NO: 376 - DNA, 6390 bp, Artificial Sequence
  Description of Artificial Sequence: Synthetic polynucleotide
  I-1c.v20 (I-I+B)
cagctggcgtaatagcgaagaggcccgcaccgatcgcccttcccaacagttgcgcagcctgaatggcgaatggcgattccgttgcaatggctggcggtaatattgttctggatattaccagcaaggccgatagtttgagttcttctactcaggcaagtgatgttattactaatcaaagaagtattgcgacaacggttaatttgcgtgatggacagactcttttactcggtggcctcactgattataaaaacacttctcaggattctggcgtaccgttcctgtctaaaatccctttaatcggcctcctgtttagctcccgctctgattctaacgaggaaagcacgttatacgtgctcgtcaaagcaaccatagtacgcgccctgtagcggcgcattaagcgcggcgggtgtggtggttacgcgcagcgtgaccgctacacttgccagcgccctagcgcccgctcctttcgctttcttcccttcctttctcgccacgttcgccggctttccccgtcaagctctaaatcgggggctccctttagggttccgatttagtgctttacggcacctcgaccccaaaaaacttgattagggtgatggttcacgtagtgggccatcgccctgatagacggtttttcgccctttgacgttggagtccacgttctttaatagtggactcttgttccaaactggaacaacactcaaccctatctcggtctattcttttgatttataagggattttgccgatttcggcctattggttaaaaaatgagctgatttaacaaaaatttaacgcgaattttaacaaaatattaacgcttacaatttaaatatttgcttatacaatcttcctgtttttggggcttttctgattatcaaccggggtacatatgattgacatgctagttttacgattaccgttcatcgtctagagctagcatatggatccatcgatttagggataacagggtaattatcagcacacaattgcccattatacgcgcgtataatggactattgtgtgctgatatctgtacacttaagggctagatcttagcttacgtcactagagggtccacgtttagtttttaagatccattgatctcctaaacgctgcaagattcgcaacctggtatacttagcctaggcgctaggtcctagtgcagcgggactttttttctaaagtcgttgagaggaggagtcgtcagaccagatagctttgatgtcctgatcggaaggatcgttggcccccctgcaggcagctgttaattaaccgattcattaatgcagcagctgcgcgctcgctcgctcactgaggccgcccgggcaaagcccgggcgtcgggcgacctttggtcgcccggcctcagtgagcgagcgagcgcgcagagagggagtggcgcgccacgcgtggatctaatagtaatcaattacggggtcattagttcatagcccatatatggagttccgcgttacataacttacggtaaatggcccgcctggctgaccgcccaacgacccccgcccattgacgtcaataatgacgtatgttcccatagtaacgccaatagggactttccattgacgtcaatgggtggagtatttacggtaaactgcccacttggcagtacatcaagtgtatcatatgccaagtccgccccctattgacgtcaatgacggtaaatggcccgcctggcattatgcccagtacatgaccttacgggactttcctacttggcagtacatctacgtattagtcatcgctattaccatggtgatgcggttttggcagtacaccaatgggcgtggatagcggtttgactcacggggatttccaagtctccaccccattgacgtcaatgggagtttgttttggcaccaaaatcaacgggactttccaaaatgtcgtaataaccccgccccgttgacgcaaatgggcggtaggcgtgtacggtgggaggtctatataagcagagctcgtttagtgaaccgtcagatcactagtgcttctgacacaacagtctcgaacttaagctgcagaagttggtcgtgaggcactgggcaggtaagtatcaaggttacaagacaggtttaaggagaccaatagaaactgggcttgtcgagacagagaagactcttgcgtttctgataggcacctattggtcttactgacatccactttgcctttctctccacaggtgtccactcccagttcaatagtactgccaccatggaacaggataacagtccaaggaaaattcagttcactgttccacttttagagcctcatttagaccctgaagctgcagaacagataagaagaagaagacctgaccctgctacacttgtgcttacaagtgatcagtctagcccagagatagacgaggatagaattcctaatccacacctcaaatcaaccctggcgtgataattcgaactgatcacttttttaataaaaggggcatttggaaaaaaaaaaaaaaggtagcagtcgacagatgaattctgcagatctgtggcttctagctgcccgggtggcatccctgtgacccctccccagtgcctctcctggccctggaagttgccactccagtgcccaccagccttgtcctaataaaattaagttgcatcattttgtctgactaggtgtccttctataatattatggggtggaggggggtggtatggagcaaggggcaagttgggaagacaacctgtagggcctgcggggtctattgggaaccaagctggagtgcagtggcacaatcttggctcactgcaatctccgcctcctgggttcaagcgattctcctgcctcagcctcccgagttgttgggattccaggcatgcatgaccaggctcagctaatttttgtttttttggtagagacggggtttcaccatattggccaggctggtctccaactcctaatctcaggtgatctacccaccttggcctcccaaattgctgggattacaggcgtgaaccactgctcccttccctgtccttctgattttaaaaaaaagagaaatgttctggcacctgcacttgcactggggacagcctattttgctagtttgttttgtttcgttttgttttgatggagagcgtatgttgtttaaacgcggccgcaggaacccctagtgatggagttggccactccctctctgcgcgctcgctcgctcactgaggccgggcgaccaaaggtcgcccgacgcccgggctttgcccgggcggcctcagtgagcgagcgagcgcgcagagagggagtggccaactggcgtaatagcgaagaggttaattaaggcgccctaggccgacccttagactctgtactcagttctataaacgagccattggatacgagatccgtagattgataagggacacggaatatccccggacgcaatagacaccggtggacagcttggtatcctgagcacagtcgcgcgtccgaatctagctctactttagaggccccggattctgatggtcgtagaccgcagaaccgattggggggatgagatctactagttatcagcacacaattgcccattatacgcgcgtataatggactattgtgtgctgatatagggataacagggtaattctagagctagcatatggatccatcgatttattctcttgtttgctccagactctcaggcaatgacctgatagcctttgtagagacctctcaaaaatagctaccctctccggcatgaatttatcagctagaacggttgaatatcatattgatggtgatttgactgtctccggcctttctcacccgtttgaatctttacctacacattactcaggcattgcatttaaaatatatgagggttctaaaaatttttatccttgcgttgaaataaaggcttctcccgcaaaagtattacagggtcataatgtttttggtacaaccgatttagctttatgctctgaggctttattgcttaattttgctaattctttgccttgcctgtatgatttattggatgttggaatcgcctgatgcggtattttctccttacgcatctgtgcggtatttcacaccgcatatggtgcactctcagtacaatctgctctgatgccgcatagttaagccagccccgacacccgccaacacccgctgacgcgccctgacgggcttgtctgctcccggcatccgcttacagacaagctgtgaccgtctccgggagctgcatgtgtcagaggttttcaccgtcatcaccgaaacgcgcgagacgaaagggcctcgtgatacgcctatttttataggttaatgtcatgataataatggtttcttagacgtcagggtaccgggccccccctcgaggtcgacggtatcgataagcttgatatcgaattcctcggggaaatgtgcgcggaacccctatttgtttatttttctaaatacattcaaatatgtatccgctcatgagacaataaccctgataaatgcttcaataatattgaaaaaggaagagtatgagccatattcaacgggaaacgtcgaggccgcgattaaattccaacatggatgctgatttatatgggtataaatgggctcgcgataatgtcgggcaatcaggtgcgacaatctatcgcttgtatgggaagcccgatgcgccagagttgtttctgaaacatggcaaaggtagcgttgccaatgatgttacagatgagatggtcagactaaactggctgacggaatttatgcctcttccgaccatcaagcattttatccgtactcctgatgatgcatggttactcaccactgcgatccccggaaaaacagcattccaggtattagaagaatatcctgattcaggtgaaaatattgttgatgcgctggcagtgttcctgcgccggttgcattcgattcctgtttgtaattgtccttttaacagcgatcgcgtatttcgtctcgctcaggcgcaatcacgaatgaataacggtttggttgatgcgagtgattttgatgacgagcgtaatggctggcctgttgaacaagtctggaaagaaatgcataaacttttgccattctcaccggattcagtcgtcactcatggtgatttctcacttgataaccttatttttgacgaggggaaattaataggttgtattgatgttggacgagtcggaatcgcagaccgataccaggatcttgccatcctatggaactgcctcggtgagttttctccttcattacagaaacggctttttcaaaaatatggtattgataatcctgatatgaataaattgcagtttcatttgatgctcgatgagtttttctaagcgtataatggtctagagctagcatatggatccatcgattccattatacgcctgtcagaccaagtttactcatatatactttagattgatttaaaacttcatttttaatttaaaaggatctaggtgaagatcctttttgataatctcatgaccaaaatcccttaacgtgagttttcgttccactgagcgtcagaccccgtagaaaagatcaaaggatcttcttgagatcctttttttctgcgcgtaatctgctgcttgcaaacaaaaaaaccaccgctaccagcggtggtttgtttgccggatcaagagctaccaactctttttccgaaggtaactggcttcagcagagcgcagataccaaatactgttcttctagtgtagccgtagttaggccaccacttcaagaactctgtagcaccgcctacatacctcgctctgctaatcctgttaccagtggctgctgccagtggcgataagtcgtgtcttaccgggttggactcaagacgatagttaccggataaggcgcagcggtcgggctgaacggggggttcgtgcacacagcccagcttggagcgaacgacctacaccgaactgagatacctacagcgtgagctatgagaaagcgccacgcttcccgaagggagaaaggcggacaggtatccggtaagcggcagggtcggaacaggagagcgcacgagggagcttccagggggaaacgcctggtatctttatagtcctgtcgggtttcgccacctctgacttgagcgtcgatttttgtgatgctcgtcaggggggcggagcctatggaaaaacgccagcaacgcggcctttttacggttcctggcctttttttcctgcagcccgggggatccaagttctagagcccgccaccgcggtggagctcgctcacatgttctttcctgcgttatcccctgattctgtggataaccgtattaccgcctttgagtgagctgataccgctcgccgcagccgaacgaccgagcgcagcgagtcagtgagcgaggaagcggaagagcgcccaatacgcaaaccgcctctccccgcgcgttggccgattcattaatg

SEQ ID NO: 377 - DNA, 6390 bp, Artificial Sequence
  Description of Artificial Sequence: Synthetic polynucleotide
  I-1c.v21 (I-I+B)
cagctggcgtaatagcgaagaggcccgcaccgatcgcccttcccaacagttgcgcagcctgaatggcgaatggcgattccgttgcaatggctggcggtaatattgttctggatattaccagcaaggccgatagtttgagttcttctactcaggcaagtgatgttattactaatcaaagaagtattgcgacaacggttaatttgcgtgatggacagactcttttactcggtggcctcactgattataaaaacacttctcaggattctggcgtaccgttcctgtctaaaatccctttaatcggcctcctgtttagctcccgctctgattctaacgaggaaagcacgttatacgtgctcgtcaaagcaaccatagtacgcgccctgtagcggcgcattaagcgcggcgggtgtggtggttacgcgcagcgtgaccgctacacttgccagcgccctagcgcccgctcctttcgctttcttcccttcctttctcgccacgttcgccggctttccccgtcaagctctaaatcgggggctccctttagggttccgatttagtgctttacggcacctcgaccccaaaaaacttgattagggtgatggttcacgtagtgggccatcgccctgatagacggtttttcgccctttgacgttggagtccacgttctttaatagtggactcttgttccaaactggaacaacactcaaccctatctcggtctattcttttgatttataagggattttgccgatttcggcctattggttaaaaaatgagctgatttaacaaaaatttaacgcgaattttaacaaaatattaacgcttacaatttaaatatttgcttatacaatcttcctgtttttggggcttttctgattatcaaccggggtacatatgattgacatgctagttttacgattaccgttcatcgtctagagctagcatatggatccatcgatttagggataacagggtaattatcagcacacaattgcccattatacgcgcgtataatggactattgtgtgctgatatctgtacacttaagggctagatcttagcttacgtcactagagggtccacgtttagtttttaagatccattgatctcctaaacgctgcaagattcgcaacctggtatacttagcctaggcgctaggtcctagtgcagcgggactttttttctaaagtcgttgagaggaggagtcgtcagaccagatagctttgatgtcctgatcggaaggatcgttggcccccctgcaggcagctgttaattaaccgattcattaatgcagcagctgcgcgctcgctcgctcactgaggccgcccgggcaaagcccgggcgtcgggcgacctttggtcgcccggcctcagtgagcgagcgagcgcgcagagagggagtggcgcgccacgcgtggatctaatagtaatcaattacggggtcattagttcatagcccatatatggagttccgcgttacataacttacggtaaatggcccgcctggctgaccgcccaacgacccccgcccattgacgtcaataatgacgtatgttcccatagtaacgccaatagggactttccattgacgtcaatgggtggagtatttacggtaaactgcccacttggcagtacatcaagtgtatcatatgccaagtccgccccctattgacgtcaatgacggtaaatggcccgcctggcattatgcccagtacatgaccttacgggactttcctacttggcagtacatctacgtattagtcatcgctattaccatggtgatgcggttttggcagtacaccaatgggcgtggatagcggtttgactcacggggatttccaagtctccaccccattgacgtcaatgggagtttgttttggcaccaaaatcaacgggactttccaaaatgtcgtaataaccccgccccgttgacgcaaatgggcggtaggcgtgtacggtgggaggtctatataagcagagctcgtttagtgaaccgtcagatcactagtgcttctgacacaacagtctcgaacttaagctgcagaagttggtcgtgaggcactgggcaggtaagtatcaaggttacaagacaggtttaaggagaccaatagaaactgggcttgtcgagacagagaagactcttgcgtttctgataggcacctattggtcttactgacatccactttgcctttctctccacaggtgtccactcccagttcaatagtactgccaccatggagcaagacaacagccccagaaagatccagttcactgtcccactgctggagccacaccttgacccagaggcagcagagcagattagaaggagaagacccgaccctgccacccttgtgctgaccagtgaccagtcttccccagagatagacgaagacagaatccccaacccacacctcaagtccactttggcgtgataattcgaactgatcacttttttaataaaaggggcatttggaaaaaaaaaaaaaaggtagcagtcgacagatgaattctgcagatctgtggcttctagctgcccgggtggcatccctgtgacccctccccagtgcctctcctggccctggaagttgccactccagtgcccaccagccttgtcctaataaaattaagttgcatcattttgtctgactaggtgtccttctataatattatggggtggaggggggtggtatggagcaaggggcaagttgggaagacaacctgtagggcctgcggggtctattgggaaccaagctggagtgcagtggcacaatcttggctcactgcaatctccgcctcctgggttcaagcgattctcctgcctcagcctcccgagttgttgggattccaggcatgcatgaccaggctcagctaatttttgtttttttggtagagacggggtttcaccatattggccaggctggtctccaactcctaatctcaggtgatctacccaccttggcctcccaaattgctgggattacaggcgtgaaccactgctcccttccctgtccttctgattttaaaaaaaagagaaatgttctggcacctgcacttgcactggggacagcctattttgctagtttgttttgtttcgttttgttttgatggagagcgtatgttgtttaaacgcggccgcaggaacccctagtgatggagttggccactccctctctgcgcgctcgctcgctcactgaggccgggcgaccaaaggtcgcccgacgcccgggctttgcccgggcggcctcagtgagcgagcgagcgcgcagagagggagtggccaactggcgtaatagcgaagaggttaattaaggcgccctaggccgacccttagactctgtactcagttctataaacgagccattggatacgagatccgtagattgataagggacacggaatatccccggacgcaatagacaccggtggacagcttggtatcctgagcacagtcgcgcgtccgaatctagctctactttagaggccccggattctgatggtcgtagaccgcagaaccgattggggggatgagatctactagttatcagcacacaattgcccattatacgcgcgtataatggactattgtgtgctgatatagggataacagggtaattctagagctagcatatggatccatcgatttattctcttgtttgctccagactctcaggcaatgacctgatagcctttgtagagacctctcaaaaatagctaccctctccggcatgaatttatcagctagaacggttgaatatcatattgatggtgatttgactgtctccggcctttctcacccgtttgaatctttacctacacattactcaggcattgcatttaaaatatatgagggttctaaaaatttttatccttgcgttgaaataaaggcttctcccgcaaaagtattacagggtcataatgtttttggtacaaccgatttagctttatgctctgaggctttattgcttaattttgctaattctttgccttgcctgtatgatttattggatgttggaatcgcctgatgcggtattttctccttacgcatctgtgcggtatttcacaccgcatatggtgcactctcagtacaatctgctctgatgccgcatagttaagccagccccgacacccgccaacacccgctgacgcgccctgacgggcttgtctgctcccggcatccgcttacagacaagctgtgaccgtctccgggagctgcatgtgtcagaggttttcaccgtcatcaccgaaacgcgcgagacgaaagggcctcgtgatacgcctatttttataggttaatgtcatgataataatggtttcttagacgtcagggtaccgggccccccctcgaggtcgacggtatcgataagcttgatatcgaattcctcggggaaatgtgcgcggaacccctatttgtttatttttctaaatacattcaaatatgtatccgctcatgagacaataaccctgataaatgcttcaataatattgaaaaaggaagagtatgagccatattcaacgggaaacgtcgaggccgcgattaaattccaacatggatgctgatttatatgggtataaatgggctcgcgataatgtcgggcaatcaggtgcgacaatctatcgcttgtatgggaagcccgatgcgccagagttgtttctgaaacatggcaaaggtagcgttgccaatgatgttacagatgagatggtcagactaaactggctgacggaatttatgcctcttccgaccatcaagcattttatccgtactcctgatgatgcatggttactcaccactgcgatccccggaaaaacagcattccaggtattagaagaatatcctgattcaggtgaaaatattgttgatgcgctggcagtgttcctgcgccggttgcattcgattcctgtttgtaattgtccttttaacagcgatcgcgtatttcgtctcgctcaggcgcaatcacgaatgaataacggtttggttgatgcgagtgattttgatgacgagcgtaatggctggcctgttgaacaagtctggaaagaaatgcataaacttttgccattctcaccggattcagtcgtcactcatggtgatttctcacttgataaccttatttttgacgaggggaaattaataggttgtattgatgttggacgagtcggaatcgcagaccgataccaggatcttgccatcctatggaactgcctcggtgagttttctccttcattacagaaacggctttttcaaaaatatggtattgataatcctgatatgaataaattgcagtttcatttgatgctcgatgagtttttctaagcgtataatggtctagagctagcatatggatccatcgattccattatacgcctgtcagaccaagtttactcatatatactttagattgatttaaaacttcatttttaatttaaaaggatctaggtgaagatcctttttgataatctcatgaccaaaatcccttaacgtgagttttcgttccactgagcgtcagaccccgtagaaaagatcaaaggatcttcttgagatcctttttttctgcgcgtaatctgctgcttgcaaacaaaaaaaccaccgctaccagcggtggtttgtttgccggatcaagagctaccaactctttttccgaaggtaactggcttcagcagagcgcagataccaaatactgttcttctagtgtagccgtagttaggccaccacttcaagaactctgtagcaccgcctacatacctcgctctgctaatcctgttaccagtggctgctgccagtggcgataagtcgtgtcttaccgggttggactcaagacgatagttaccggataaggcgcagcggtcgggctgaacggggggttcgtgcacacagcccagcttggagcgaacgacctacaccgaactgagatacctacagcgtgagctatgagaaagcgccacgcttcccgaagggagaaaggcggacaggtatccggtaagcggcagggtcggaacaggagagcgcacgagggagcttccagggggaaacgcctggtatctttatagtcctgtcgggtttcgccacctctgacttgagcgtcgatttttgtgatgctcgtcaggggggcggagcctatggaaaaacgccagcaacgcggcctttttacggttcctggcctttttttcctgcagcccgggggatccaagttctagagcccgccaccgcggtggagctcgctcacatgttctttcctgcgttatcccctgattctgtggataaccgtattaccgcctttgagtgagctgataccgctcgccgcagccgaacgaccgagcgcagcgagtcagtgagcgaggaagcggaagagcgcccaatacgcaaaccgcctctccccgcgcgttggccgattcattaatg

SEQ ID NO: 378 - DNA, 6390 bp, Artificial Sequence
  Description of Artificial Sequence: Synthetic polynucleotide
  I-1c.v22 (I-I+B)
cagctggcgtaatagcgaagaggcccgcaccgatcgcccttcccaacagttgcgcagcctgaatggcgaatggcgattccgttgcaatggctggcggtaatattgttctggatattaccagcaaggccgatagtttgagttcttctactcaggcaagtgatgttattactaatcaaagaagtattgcgacaacggttaatttgcgtgatggacagactcttttactcggtggcctcactgattataaaaacacttctcaggattctggcgtaccgttcctgtctaaaatccctttaatcggcctcctgtttagctcccgctctgattctaacgaggaaagcacgttatacgtgctcgtcaaagcaaccatagtacgcgccctgtagcggcgcattaagcgcggcgggtgtggtggttacgcgcagcgtgaccgctacacttgccagcgccctagcgcccgctcctttcgctttcttcccttcctttctcgccacgttcgccggctttccccgtcaagctctaaatcgggggctccctttagggttccgatttagtgctttacggcacctcgaccccaaaaaacttgattagggtgatggttcacgtagtgggccatcgccctgatagacggtttttcgccctttgacgttggagtccacgttctttaatagtggactcttgttccaaactggaacaacactcaaccctatctcggtctattcttttgatttataagggattttgccgatttcggcctattggttaaaaaatgagctgatttaacaaaaatttaacgcgaattttaacaaaatattaacgcttacaatttaaatatttgcttatacaatcttcctgtttttggggcttttctgattatcaaccggggtacatatgattgacatgctagttttacgattaccgttcatcgtctagagctagcatatggatccatcgatttagggataacagggtaattatcagcacacaattgcccattatacgcgcgtataatggactattgtgtgctgatatctgtacacttaagggctagatcttagcttacgtcactagagggtccacgtttagtttttaagatccattgatctcctaaacgctgcaagattcgcaacctggtatacttagcctaggcgctaggtcctagtgcagcgggactttttttctaaagtcgttgagaggaggagtcgtcagaccagatagctttgatgtcctgatcggaaggatcgttggcccccctgcaggcagctgttaattaaccgattcattaatgcagcagctgcgcgctcgctcgctcactgaggccgcccgggcaaagcccgggcgtcgggcgacctttggtcgcccggcctcagtgagcgagcgagcgcgcagagagggagtggcgcgccacgcgtggatctaatagtaatcaattacggggtcattagttcatagcccatatatggagttccgcgttacataacttacggtaaatggcccgcctggctgaccgcccaacgacccccgcccattgacgtcaataatgacgtatgttcccatagtaacgccaatagggactttccattgacgtcaatgggtggagtatttacggtaaactgcccacttggcagtacatcaagtgtatcatatgccaagtccgccccctattgacgtcaatgacggtaaatggcccgcctggcattatgcccagtacatgaccttacgggactttcctacttggcagtacatctacgtattagtcatcgctattaccatggtgatgcggttttggcagtacaccaatgggcgtggatagcggtttgactcacggggatttccaagtctccaccccattgacgtcaatgggagtttgttttggcaccaaaatcaacgggactttccaaaatgtcgtaataaccccgccccgttgacgcaaatgggcggtaggcgtgtacggtgggaggtctatataagcagagctcgtttagtgaaccgtcagatcactagtgcttctgacacaacagtctcgaacttaagctgcagaagttggtcgtgaggcactgggcaggtaagtatcaaggttacaagacaggtttaaggagaccaatagaaactgggcttgtcgagacagagaagactcttgcgtttctgataggcacctattggtcttactgacatccactttgcctttctctccacaggtgtccactcccagttcaatagtactgccaccatggagcaagacaacagcccccgaaagatccagttcacggtcccgctgctggagccgcaccttgaccccgaggcggcggagcagattcggaggcgccgccccgaccctgccaccctcgtgctgaccagtgaccagtcatccccagagatagatgaagaccggatccccaacccacatctcaagtccactttggcatgataattcgaactgatcacttttttaataaaaggggcatttggaaaaaaaaaaaaaaggtagcagtcgacagatgaattctgcagatctgtggcttctagctgcccgggtggcatccctgtgacccctccccagtgcctctcctggccctggaagttgccactccagtgcccaccagccttgtcctaataaaattaagttgcatcattttgtctgactaggtgtccttctataatattatggggtggaggggggtggtatggagcaaggggcaagttgggaagacaacctgtagggcctgcggggtctattgggaaccaagctggagtgcagtggcacaatcttggctcactgcaatctccgcctcctgggttcaagcgattctcctgcctcagcctcccgagttgttgggattccaggcatgcatgaccaggctcagctaatttttgtttttttggtagagacggggtttcaccatattggccaggctggtctccaactcctaatctcaggtgatctacccaccttggcctcccaaattgctgggattacaggcgtgaaccactgctcccttccctgtccttctgattttaaaaaaaagagaaatgttctggcacctgcacttgcactggggacagcctattttgctagtttgttttgtttcgttttgttttgatggagagcgtatgttgtttaaacgcggccgcaggaacccctagtgatggagttggccactccctctctgcgcgctcgctcgctcactgaggccgggcgaccaaaggtcgcccgacgcccgggctttgcccgggcggcctcagtgagcgagcgagcgcgcagagagggagtggccaactggcgtaatagcgaagaggttaattaaggcgccctaggccgacccttagactctgtactcagttctataaacgagccattggatacgagatccgtagattgataagggacacggaatatccccggacgcaatagacaccggtggacagcttggtatcctgagcacagtcgcgcgtccgaatctagctctactttagaggccccggattctgatggtcgtagaccgcagaaccgattggggggatgagatctactagttatcagcacacaattgcccattatacgcgcgtataatggactattgtgtgctgatatagggataacagggtaattctagagctagcatatggatccatcgatttattctcttgtttgctccagactctcaggcaatgacctgatagcctttgtagagacctctcaaaaatagctaccctctccggcatgaatttatcagctagaacggttgaatatcatattgatggtgatttgactgtctccggcctttctcacccgtttgaatctttacctacacattactcaggcattgcatttaaaatatatgagggttctaaaaatttttatccttgcgttgaaataaaggcttctcccgcaaaagtattacagggtcataatgtttttggtacaaccgatttagctttatgctctgaggctttattgcttaattttgctaattctttgccttgcctgtatgatttattggatgttggaatcgcctgatgcggtattttctccttacgcatctgtgcggtatttcacaccgcatatggtgcactctcagtacaatctgctctgatgccgcatagttaagccagccccgacacccgccaacacccgctgacgcgccctgacgggcttgtctgctcccggcatccgcttacagacaagctgtgaccgtctccgggagctgcatgtgtcagaggttttcaccgtcatcaccgaaacgcgcgagacgaaagggcctcgtgatacgcctatttttataggttaatgtcatgataataatggtttcttagacgtcagggtaccgggccccccctcgaggtcgacggtatcgataagcttgatatcgaattcctcggggaaatgtgcgcggaacccctatttgtttatttttctaaatacattcaaatatgtatccgctcatgagacaataaccctgataaatgcttcaataatattgaaaaaggaagagtatgagccatattcaacgggaaacgtcgaggccgcgattaaattccaacatggatgctgatttatatgggtataaatgggctcgcgataatgtcgggcaatcaggtgcgacaatctatcgcttgtatgggaagcccgatgcgccagagttgtttctgaaacatggcaaaggtagcgttgccaatgatgttacagatgagatggtcagactaaactggctgacggaatttatgcctcttccgaccatcaagcattttatccgtactcctgatgatgcatggttactcaccactgcgatccccggaaaaacagcattccaggtattagaagaatatcctgattcaggtgaaaatattgttgatgcgctggcagtgttcctgcgccggttgcattcgattcctgtttgtaattgtccttttaacagcgatcgcgtatttcgtctcgctcaggcgcaatcacgaatgaataacggtttggttgatgcgagtgattttgatgacgagcgtaatggctggcctgttgaacaagtctggaaagaaatgcataaacttttgccattctcaccggattcagtcgtcactcatggtgatttctcacttgataaccttatttttgacgaggggaaattaataggttgtattgatgttggacgagtcggaatcgcagaccgataccaggatcttgccatcctatggaactgcctcggtgagttttctccttcattacagaaacggctttttcaaaaatatggtattgataatcctgatatgaataaattgcagtttcatttgatgctcgatgagtttttctaagcgtataatggtctagagctagcatatggatccatcgattccattatacgcctgtcagaccaagtttactcatatatactttagattgatttaaaacttcatttttaatttaaaaggatctaggtgaagatcctttttgataatctcatgaccaaaatcccttaacgtgagttttcgttccactgagcgtcagaccccgtagaaaagatcaaaggatcttcttgagatcctttttttctgcgcgtaatctgctgcttgcaaacaaaaaaaccaccgctaccagcggtggtttgtttgccggatcaagagctaccaactctttttccgaaggtaactggcttcagcagagcgcagataccaaatactgttcttctagtgtagccgtagttaggccaccacttcaagaactctgtagcaccgcctacatacctcgctctgctaatcctgttaccagtggctgctgccagtggcgataagtcgtgtcttaccgggttggactcaagacgatagttaccggataaggcgcagcggtcgggctgaacggggggttcgtgcacacagcccagcttggagcgaacgacctacaccgaactgagatacctacagcgtgagctatgagaaagcgccacgcttcccgaagggagaaaggcggacaggtatccggtaagcggcagggtcggaacaggagagcgcacgagggagcttccagggggaaacgcctggtatctttatagtcctgtcgggtttcgccacctctgacttgagcgtcgatttttgtgatgctcgtcaggggggcggagcctatggaaaaacgccagcaacgcggcctttttacggttcctggcctttttttcctgcagcccgggggatccaagttctagagcccgccaccgcggtggagctcgctcacatgttctttcctgcgttatcccctgattctgtggataaccgtattaccgcctttgagtgagctgataccgctcgccgcagccgaacgaccgagcgcagcgagtcagtgagcgaggaagcggaagagcgcccaatacgcaaaccgcctctccccgcgcgttggccgattcattaatg

SEQ ID NO: 379 - DNA, 6390 bp, Artificial Sequence
  Description of Artificial Sequence: Synthetic polynucleotide
  I-1c.v23 (I-I+B)
cagctggcgtaatagcgaagaggcccgcaccgatcgcccttcccaacagttgcgcagcctgaatggcgaatggcgattccgttgcaatggctggcggtaatattgttctggatattaccagcaaggccgatagtttgagttcttctactcaggcaagtgatgttattactaatcaaagaagtattgcgacaacggttaatttgcgtgatggacagactcttttactcggtggcctcactgattataaaaacacttctcaggattctggcgtaccgttcctgtctaaaatccctttaatcggcctcctgtttagctcccgctctgattctaacgaggaaagcacgttatacgtgctcgtcaaagcaaccatagtacgcgccctgtagcggcgcattaagcgcggcgggtgtggtggttacgcgcagcgtgaccgctacacttgccagcgccctagcgcccgctcctttcgctttcttcccttcctttctcgccacgttcgccggctttccccgtcaagctctaaatcgggggctccctttagggttccgatttagtgctttacggcacctcgaccccaaaaaacttgattagggtgatggttcacgtagtgggccatcgccctgatagacggtttttcgccctttgacgttggagtccacgttctttaatagtggactcttgttccaaactggaacaacactcaaccctatctcggtctattcttttgatttataagggattttgccgatttcggcctattggttaaaaaatgagctgatttaacaaaaatttaacgcgaattttaacaaaatattaacgcttacaatttaaatatttgcttatacaatcttcctgtttttggggcttttctgattatcaaccggggtacatatgattgacatgctagttttacgattaccgttcatcgtctagagctagcatatggatccatcgatttagggataacagggtaattatcagcacacaattgcccattatacgcgcgtataatggactattgtgtgctgatatctgtacacttaagggctagatcttagcttacgtcactagagggtccacgtttagtttttaagatccattgatctcctaaacgctgcaagattcgcaacctggtatacttagcctaggcgctaggtcctagtgcagcgggactttttttctaaagtcgttgagaggaggagtcgtcagaccagatagctttgatgtcctgatcggaaggatcgttggcccccctgcaggcagctgttaattaaccgattcattaatgcagcagctgcgcgctcgctcgctcactgaggccgcccgggcaaagcccgggcgtcgggcgacctttggtcgcccggcctcagtgagcgagcgagcgcgcagagagggagtggcgcgccacgcgtggatctaatagtaatcaattacggggtcattagttcatagcccatatatggagttccgcgttacataacttacggtaaatggcccgcctggctgaccgcccaacgacccccgcccattgacgtcaataatgacgtatgttcccatagtaacgccaatagggactttccattgacgtcaatgggtggagtatttacggtaaactgcccacttggcagtacatcaagtgtatcatatgccaagtccgccccctattgacgtcaatgacggtaaatggcccgcctggcattatgcccagtacatgaccttacgggactttcctacttggcagtacatctacgtattagtcatcgctattaccatggtgatgcggttttggcagtacaccaatgggcgtggatagcggtttgactcacggggatttccaagtctccaccccattgacgtcaatgggagtttgttttggcaccaaaatcaacgggactttccaaaatgtcgtaataaccccgccccgttgacgcaaatgggcggtaggcgtgtacggtgggaggtctatataagcagagctcgtttagtgaaccgtcagatcactagtgcttctgacacaacagtctcgaacttaagctgcagaagttggtcgtgaggcactgggcaggtaagtatcaaggttacaagacaggtttaaggagaccaatagaaactgggcttgtcgagacagagaagactcttgcgtttctgataggcacctattggtcttactgacatccactttgcctttctctccacaggtgtccactcccagttcaatagtactgccaccatggaacaggacaacagcccccggaagatccagttcaccgtgcccctgctggaaccccacctggaccccgaggccgccgagcagatccggcggagaaggcccgaccccgccaccctggtgctgaccagcgaccagagcagccccgagatcgacgaggaccgaatccccaacccccacctgaagagcaccctggcctgatgattcgaactgatcacttttttaataaaaggggcatttggaaaaaaaaaaaaaaggtagcagtcgacagatgaattctgcagatctgtggcttctagctgcccgggtggcatccctgtgacccctccccagtgcctctcctggccctggaagttgccactccagtgcccaccagccttgtcctaataaaattaagttgcatcattttgtctgactaggtgtccttctataatattatggggtggaggggggtggtatggagcaaggggcaagttgggaagacaacctgtagggcctgcggggtctattgggaaccaagctggagtgcagtggcacaatcttggctcactgcaatctccgcctcctgggttcaagcgattctcctgcctcagcctcccgagttgttgggattccaggcatgcatgaccaggctcagctaatttttgtttttttggtagagacggggtttcaccatattggccaggctggtctccaactcctaatctcaggtgatctacccaccttggcctcccaaattgctgggattacaggcgtgaaccactgctcccttccctgtccttctgattttaaaaaaaagagaaatgttctggcacctgcacttgcactggggacagcctattttgctagtttgttttgtttcgttttgttttgatggagagcgtatgttgtttaaacgcggccgcaggaacccctagtgatggagttggccactccctctctgcgcgctcgctcgctcactgaggccgggcgaccaaaggtcgcccgacgcccgggctttgcccgggcggcctcagtgagcgagcgagcgcgcagagagggagtggccaactggcgtaatagcgaagaggttaattaaggcgccctaggccgacccttagactctgtactcagttctataaacgagccattggatacgagatccgtagattgataagggacacggaatatccccggacgcaatagacaccggtggacagcttggtatcctgagcacagtcgcgcgtccgaatctagctctactttagaggccccggattctgatggtcgtagaccgcagaaccgattggggggatgagatctactagttatcagcacacaattgcccattatacgcgcgtataatggactattgtgtgctgatatagggataacagggtaattctagagctagcatatggatccatcgatttattctcttgtttgctccagactctcaggcaatgacctgatagcctttgtagagacctctcaaaaatagctaccctctccggcatgaatttatcagctagaacggttgaatatcatattgatggtgatttgactgtctccggcctttctcacccgtttgaatctttacctacacattactcaggcattgcatttaaaatatatgagggttctaaaaatttttatccttgcgttgaaataaaggcttctcccgcaaaagtattacagggtcataatgtttttggtacaaccgatttagctttatgctctgaggctttattgcttaattttgctaattctttgccttgcctgtatgatttattggatgttggaatcgcctgatgcggtattttctccttacgcatctgtgcggtatttcacaccgcatatggtgcactctcagtacaatctgctctgatgccgcatagttaagccagccccgacacccgccaacacccgctgacgcgccctgacgggcttgtctgctcccggcatccgcttacagacaagctgtgaccgtctccgggagctgcatgtgtcagaggttttcaccgtcatcaccgaaacgcgcgagacgaaagggcctcgtgatacgcctatttttataggttaatgtcatgataataatggtttcttagacgtcagggtaccgggccccccctcgaggtcgacggtatcgataagcttgatatcgaattcctcggggaaatgtgcgcggaacccctatttgtttatttttctaaatacattcaaatatgtatccgctcatgagacaataaccctgataaatgcttcaataatattgaaaaaggaagagtatgagccatattcaacgggaaacgtcgaggccgcgattaaattccaacatggatgctgatttatatgggtataaatgggctcgcgataatgtcgggcaatcaggtgcgacaatctatcgcttgtatgggaagcccgatgcgccagagttgtttctgaaacatggcaaaggtagcgttgccaatgatgttacagatgagatggtcagactaaactggctgacggaatttatgcctcttccgaccatcaagcattttatccgtactcctgatgatgcatggttactcaccactgcgatccccggaaaaacagcattccaggtattagaagaatatcctgattcaggtgaaaatattgttgatgcgctggcagtgttcctgcgccggttgcattcgattcctgtttgtaattgtccttttaacagcgatcgcgtatttcgtctcgctcaggcgcaatcacgaatgaataacggtttggttgatgcgagtgattttgatgacgagcgtaatggctggcctgttgaacaagtctggaaagaaatgcataaacttttgccattctcaccggattcagtcgtcactcatggtgatttctcacttgataaccttatttttgacgaggggaaattaataggttgtattgatgttggacgagtcggaatcgcagaccgataccaggatcttgccatcctatggaactgcctcggtgagttttctccttcattacagaaacggctttttcaaaaatatggtattgataatcctgatatgaataaattgcagtttcatttgatgctcgatgagtttttctaagcgtataatggtctagagctagcatatggatccatcgattccattatacgcctgtcagaccaagtttactcatatatactttagattgatttaaaacttcatttttaatttaaaaggatctaggtgaagatcctttttgataatctcatgaccaaaatcccttaacgtgagttttcgttccactgagcgtcagaccccgtagaaaagatcaaaggatcttcttgagatcctttttttctgcgcgtaatctgctgcttgcaaacaaaaaaaccaccgctaccagcggtggtttgtttgccggatcaagagctaccaactctttttccgaaggtaactggcttcagcagagcgcagataccaaatactgttcttctagtgtagccgtagttaggccaccacttcaagaactctgtagcaccgcctacatacctcgctctgctaatcctgttaccagtggctgctgccagtggcgataagtcgtgtcttaccgggttggactcaagacgatagttaccggataaggcgcagcggtcgggctgaacggggggttcgtgcacacagcccagcttggagcgaacgacctacaccgaactgagatacctacagcgtgagctatgagaaagcgccacgcttcccgaagggagaaaggcggacaggtatccggtaagcggcagggtcggaacaggagagcgcacgagggagcttccagggggaaacgcctggtatctttatagtcctgtcgggtttcgccacctctgacttgagcgtcgatttttgtgatgctcgtcaggggggcggagcctatggaaaaacgccagcaacgcggcctttttacggttcctggcctttttttcctgcagcccgggggatccaagttctagagcccgccaccgcggtggagctcgctcacatgttctttcctgcgttatcccctgattctgtggataaccgtattaccgcctttgagtgagctgataccgctcgccgcagccgaacgaccgagcgcagcgagtcagtgagcgaggaagcggaagagcgcccaatacgcaaaccgcctctccccgcgcgttggccgattcattaatg

SEQ ID NO: 380 - DNA, 5963 bp, Artificial Sequence
  Description of Artificial Sequence: Synthetic polynucleotide
  I-1c.v24 (I-I+B)
cagctggcgtaatagcgaagaggcccgcaccgatcgcccttcccaacagttgcgcagcctgaatggcgaatggcgattccgttgcaatggctggcggtaatattgttctggatattaccagcaaggccgatagtttgagttcttctactcaggcaagtgatgttattactaatcaaagaagtattgcgacaacggttaatttgcgtgatggacagactcttttactcggtggcctcactgattataaaaacacttctcaggattctggcgtaccgttcctgtctaaaatccctttaatcggcctcctgtttagctcccgctctgattctaacgaggaaagcacgttatacgtgctcgtcaaagcaaccatagtacgcgccctgtagcggcgcattaagcgcggcgggtgtggtggttacgcgcagcgtgaccgctacacttgccagcgccctagcgcccgctcctttcgctttcttcccttcctttctcgccacgttcgccggctttccccgtcaagctctaaatcgggggctccctttagggttccgatttagtgctttacggcacctcgaccccaaaaaacttgattagggtgatggttcacgtagtgggccatcgccctgatagacggtttttcgccctttgacgttggagtccacgttctttaatagtggactcttgttccaaactggaacaacactcaaccctatctcggtctattcttttgatttataagggattttgccgatttcggcctattggttaaaaaatgagctgatttaacaaaaatttaacgcgaattttaacaaaatattaacgcttacaatttaaatatttgcttatacaatcttcctgtttttggggcttttctgattatcaaccggggtacatatgattgacatgctagttttacgattaccgttcatcgtctagagctagcatatggatccatcgatttagggataacagggtaattatcagcacacaattgcccattatacgcgcgtataatggactattgtgtgctgatatctgtacacttaagggctagatcttagcttacgtcactagagggtccacgtttagtttttaagatccattgatctcctaaacgctgcaagattcgcaacctggtatacttagcctaggcgctaggtcctagtgcagcgggactttttttctaaagtcgttgagaggaggagtcgtcagaccagatagctttgatgtcctgatcggaaggatcgttggcccccctgcaggcagctgttaattaaccgattcattaatgcagcagctgcgcgctcgctcgctcactgaggccgcccgggcaaagcccgggcgtcgggcgacctttggtcgcccggcctcagtgagcgagcgagcgcgcagagagggagtggcgcgccacgcgtggatctaatagtaatcaattacggggtcattagttcatagcccatatatggagttccgcgttacataacttacggtaaatggcccgcctggctgaccgcccaacgacccccgcccattgacgtcaataatgacgtatgttcccatagtaacgccaatagggactttccattgacgtcaatgggtggagtatttacggtaaactgcccacttggcagtacatcaagtgtatcatatgccaagtccgccccctattgacgtcaatgacggtaaatggcccgcctggcattatgcccagtacatgaccttacgggactttcctacttggcagtacatctacgtattagtcatcgctattaccatggtgatgcggttttggcagtacaccaatgggcgtggatagcggtttgactcacggggatttccaagtctccaccccattgacgtcaatgggagtttgttttggcaccaaaatcaacgggactttccaaaatgtcgtaataaccccgccccgttgacgcaaatgggcggtaggcgtgtacggtgggaggtctatataagcagagctcgtttagtgaaccgtcagatcactagtgcttctgacacaacagtctcgaacttaagctgcagaagttggtcgtgaggcactgggcaggtaagtatcaaggttacaagacaggtttaaggagaccaatagaaactgggcttgtcgagacagagaagactcttgcgtttctgataggcacctattggtcttactgacatccactttgcctttctctccacaggtgtccactcccagttcaatagtactgccaccatggaacaggacaacagcccccggaagatccagttcaccgtgcccctgctggaaccccacctggaccccgaggccgccgagcagatccggcggagaaggcccgaccccgccaccctggtgctgaccagcgaccagagcagccccgagatcgacgaggaccgaatccccaacccccacctgaagagcaccctggcctgatgagggccgcgacactagatcataatcagccataccacatttgtagaggttttacttgctttaaaaaacctcccacacctccccctgaacctgaaacataaaatgaatgcaattgttgttgttaacttgtttattgcagcttataatggttacaaataaagcaatagcatcacaaatttcacaaataaagcatttttttcactgcattctagttgtggtttgtccaaactcatcaatgtatcttaaggcgggaattgatctgtttaaacgcggccgcaggaacccctagtgatggagttggccactccctctctgcgcgctcgctcgctcactgaggccgggcgaccaaaggtcgcccgacgcccgggctttgcccgggcggcctcagtgagcgagcgagcgcgcagagagggagtggccaactggcgtaatagcgaagaggttaattaaggcgccctaggccgacccttagactctgtactcagttctataaacgagccattggatacgagatccgtagattgataagggacacggaatatccccggacgcaatagacaccggtggacagcttggtatcctgagcacagtcgcgcgtccgaatctagctctactttagaggccccggattctgatggtcgtagaccgcagaaccgattggggggatgagatctactagttatcagcacacaattgcccattatacgcgcgtataatggactattgtgtgctgatatagggataacagggtaattctagagctagcatatggatccatcgatttattctcttgtttgctccagactctcaggcaatgacctgatagcctttgtagagacctctcaaaaatagctaccctctccggcatgaatttatcagctagaacggttgaatatcatattgatggtgatttgactgtctccggcctttctcacccgtttgaatctttacctacacattactcaggcattgcatttaaaatatatgagggttctaaaaatttttatccttgcgttgaaataaaggcttctcccgcaaaagtattacagggtcataatgtttttggtacaaccgatttagctttatgctctgaggctttattgcttaattttgctaattctttgccttgcctgtatgatttattggatgttggaatcgcctgatgcggtattttctccttacgcatctgtgcggtatttcacaccgcatatggtgcactctcagtacaatctgctctgatgccgcatagttaagccagccccgacacccgccaacacccgctgacgcgccctgacgggcttgtctgctcccggcatccgcttacagacaagctgtgaccgtctccgggagctgcatgtgtcagaggttttcaccgtcatcaccgaaacgcgcgagacgaaagggcctcgtgatacgcctatttttataggttaatgtcatgataataatggtttcttagacgtcagggtaccgggccccccctcgaggtcgacggtatcgataagcttgatatcgaattcctcggggaaatgtgcgcggaacccctatttgtttatttttctaaatacattcaaatatgtatccgctcatgagacaataaccctgataaatgcttcaataatattgaaaaaggaagagtatgagccatattcaacgggaaacgtcgaggccgcgattaaattccaacatggatgctgatttatatgggtataaatgggctcgcgataatgtcgggcaatcaggtgcgacaatctatcgcttgtatgggaagcccgatgcgccagagttgtttctgaaacatggcaaaggtagcgttgccaatgatgttacagatgagatggtcagactaaactggctgacggaatttatgcctcttccgaccatcaagcattttatccgtactcctgatgatgcatggttactcaccactgcgatccccggaaaaacagcattccaggtattagaagaatatcctgattcaggtgaaaatattgttgatgcgctggcagtgttcctgcgccggttgcattcgattcctgtttgtaattgtccttttaacagcgatcgcgtatttcgtctcgctcaggcgcaatcacgaatgaataacggtttggttgatgcgagtgattttgatgacgagcgtaatggctggcctgttgaacaagtctggaaagaaatgcataaacttttgccattctcaccggattcagtcgtcactcatggtgatttctcacttgataaccttatttttgacgaggggaaattaataggttgtattgatgttggacgagtcggaatcgcagaccgataccaggatcttgccatcctatggaactgcctcggtgagttttctccttcattacagaaacggctttttcaaaaatatggtattgataatcctgatatgaataaattgcagtttcatttgatgctcgatgagtttttctaagcgtataatggtctagagctagcatatggatccatcgattccattatacgcctgtcagaccaagtttactcatatatactttagattgatttaaaacttcatttttaatttaaaaggatctaggtgaagatcctttttgataatctcatgaccaaaatcccttaacgtgagttttcgttccactgagcgtcagaccccgtagaaaagatcaaaggatcttcttgagatcctttttttctgcgcgtaatctgctgcttgcaaacaaaaaaaccaccgctaccagcggtggtttgtttgccggatcaagagctaccaactctttttccgaaggtaactggcttcagcagagcgcagataccaaatactgttcttctagtgtagccgtagttaggccaccacttcaagaactctgtagcaccgcctacatacctcgctctgctaatcctgttaccagtggctgctgccagtggcgataagtcgtgtcttaccgggttggactcaagacgatagttaccggataaggcgcagcggtcgggctgaacggggggttcgtgcacacagcccagcttggagcgaacgacctacaccgaactgagatacctacagcgtgagctatgagaaagcgccacgcttcccgaagggagaaaggcggacaggtatccggtaagcggcagggtcggaacaggagagcgcacgagggagcttccagggggaaacgcctggtatctttatagtcctgtcgggtttcgccacctctgacttgagcgtcgatttttgtgatgctcgtcaggggggcggagcctatggaaaaacgccagcaacgcggcctttttacggttcctggcctttttttcctgcagcccgggggatccaagttctagagcccgccaccgcggtggagctcgctcacatgttctttcctgcgttatcccctgattctgtggataaccgtattaccgcctttgagtgagctgataccgctcgccgcagccgaacgaccgagcgcagcgagtcagtgagcgaggaagcggaagagcgcccaatacgcaaaccgcctctccccgcgcgttggccgattcattaatg

SEQ ID NO: 381 - DNA, 6390 bp, Artificial Sequence
  Description of Artificial Sequence: Synthetic polynucleotide
  I-1c.v25 (I-I+B)
cagctggcgtaatagcgaagaggcccgcaccgatcgcccttcccaacagttgcgcagcctgaatggcgaatggcgattccgttgcaatggctggcggtaatattgttctggatattaccagcaaggccgatagtttgagttcttctactcaggcaagtgatgttattactaatcaaagaagtattgcgacaacggttaatttgcgtgatggacagactcttttactcggtggcctcactgattataaaaacacttctcaggattctggcgtaccgttcctgtctaaaatccctttaatcggcctcctgtttagctcccgctctgattctaacgaggaaagcacgttatacgtgctcgtcaaagcaaccatagtacgcgccctgtagcggcgcattaagcgcggcgggtgtggtggttacgcgcagcgtgaccgctacacttgccagcgccctagcgcccgctcctttcgctttcttcccttcctttctcgccacgttcgccggctttccccgtcaagctctaaatcgggggctccctttagggttccgatttagtgctttacggcacctcgaccccaaaaaacttgattagggtgatggttcacgtagtgggccatcgccctgatagacggtttttcgccctttgacgttggagtccacgttctttaatagtggactcttgttccaaactggaacaacactcaaccctatctcggtctattcttttgatttataagggattttgccgatttcggcctattggttaaaaaatgagctgatttaacaaaaatttaacgcgaattttaacaaaatattaacgcttacaatttaaatatttgcttatacaatcttcctgtttttggggcttttctgattatcaaccggggtacatatgattgacatgctagttttacgattaccgttcatcgtctagagctagcatatggatccatcgatttagggataacagggtaattatcagcacacaattgcccattatacgcgcgtataatggactattgtgtgctgatatctgtacacttaagggctagatcttagcttacgtcactagagggtccacgtttagtttttaagatccattgatctcctaaacgctgcaagattcgcaacctggtatacttagcctaggcgctaggtcctagtgcagcgggactttttttctaaagtcgttgagaggaggagtcgtcagaccagatagctttgatgtcctgatcggaaggatcgttggcccccctgcaggcagctgttaattaaccgattcattaatgcagcagctgcgcgctcgctcgctcactgaggccgcccgggcaaagcccgggcgtcgggcgacctttggtcgcccggcctcagtgagcgagcgagcgcgcagagagggagtggcgcgccacgcgtggatctaatagtaatcaattacggggtcattagttcatagcccatatatggagttccgcgttacataacttacggtaaatggcccgcctggctgaccgcccaacgacccccgcccattgacgtcaataatgacgtatgttcccatagtaacgccaatagggactttccattgacgtcaatgggtggagtatttacggtaaactgcccacttggcagtacatcaagtgtatcatatgccaagtccgccccctattgacgtcaatgacggtaaatggcccgcctggcattatgcccagtacatgaccttacgggactttcctacttggcagtacatctacgtattagtcatcgctattaccatggtgatgcggttttggcagtacaccaatgggcgtggatagcggtttgactcacggggatttccaagtctccaccccattgacgtcaatgggagtttgttttggcaccaaaatcaacgggactttccaaaatgtcgtaataaccccgccccgttgacgcaaatgggcggtaggcgtgtacggtgggaggtctatataagcagagctcgtttagtgaaccgtcagatcactagtgcttctgacacaacagtctcgaacttaagctgcagaagttggtcgtgaggcactgggcaggtaagtatcaaggttacaagacaggtttaaggagaccaatagaaactgggcttgtcgagacagagaagactcttgcgtttctgataggcacctattggtcttactgacatccactttgcctttctctccacaggtgtccactcccagttcaatagtactgccaccatggaacaggacaacagccccaggaagatccagttcacagtgcccctgctggaaccccacctggaccctgaggctgctgagcagatcaggaggagaaggcctgaccctgccaccctggtgctgaccagtgaccagagcagccctgagattgacgaggacaggattcccaacccccacctgaagagcaccctggcctgataattcgaactgatcacttttttaataaaaggggcatttggaaaaaaaaaaaaaaggtagcagtcgacagatgaattctgcagatctgtggcttctagctgcccgggtggcatccctgtgacccctccccagtgcctctcctggccctggaagttgccactccagtgcccaccagccttgtcctaataaaattaagttgcatcattttgtctgactaggtgtccttctataatattatggggtggaggggggtggtatggagcaaggggcaagttgggaagacaacctgtagggcctgcggggtctattgggaaccaagctggagtgcagtggcacaatcttggctcactgcaatctccgcctcctgggttcaagcgattctcctgcctcagcctcccgagttgttgggattccaggcatgcatgaccaggctcagctaatttttgtttttttggtagagacggggtttcaccatattggccaggctggtctccaactcctaatctcaggtgatctacccaccttggcctcccaaattgctgggattacaggcgtgaaccactgctcccttccctgtccttctgattttaaaaaaaagagaaatgttctggcacctgcacttgcactggggacagcctattttgctagtttgttttgtttcgttttgttttgatggagagcgtatgttgtttaaacgcggccgcaggaacccctagtgatggagttggccactccctctctgcgcgctcgctcgctcactgaggccgggcgaccaaaggtcgcccgacgcccgggctttgcccgggcggcctcagtgagcgagcgagcgcgcagagagggagtggccaactggcgtaatagcgaagaggttaattaaggcgccctaggccgacccttagactctgtactcagttctataaacgagccattggatacgagatccgtagattgataagggacacggaatatccccggacgcaatagacaccggtggacagcttggtatcctgagcacagtcgcgcgtccgaatctagctctactttagaggccccggattctgatggtcgtagaccgcagaaccgattggggggatgagatctactagttatcagcacacaattgcccattatacgcgcgtataatggactattgtgtgctgatatagggataacagggtaattctagagctagcatatggatccatcgatttattctcttgtttgctccagactctcaggcaatgacctgatagcctttgtagagacctctcaaaaatagctaccctctccggcatgaatttatcagctagaacggttgaatatcatattgatggtgatttgactgtctccggcctttctcacccgtttgaatctttacctacacattactcaggcattgcatttaaaatatatgagggttctaaaaatttttatccttgcgttgaaataaaggcttctcccgcaaaagtattacagggtcataatgtttttggtacaaccgatttagctttatgctctgaggctttattgcttaattttgctaattctttgccttgcctgtatgatttattggatgttggaatcgcctgatgcggtattttctccttacgcatctgtgcggtatttcacaccgcatatggtgcactctcagtacaatctgctctgatgccgcatagttaagccagccccgacacccgccaacacccgctgacgcgccctgacgggcttgtctgctcccggcatccgcttacagacaagctgtgaccgtctccgggagctgcatgtgtcagaggttttcaccgtcatcaccgaaacgcgcgagacgaaagggcctcgtgatacgcctatttttataggttaatgtcatgataataatggtttcttagacgtcagggtaccgggccccccctcgaggtcgacggtatcgataagcttgatatcgaattcctcggggaaatgtgcgcggaacccctatttgtttatttttctaaatacattcaaatatgtatccgctcatgagacaataaccctgataaatgcttcaataatattgaaaaaggaagagtatgagccatattcaacgggaaacgtcgaggccgcgattaaattccaacatggatgctgatttatatgggtataaatgggctcgcgataatgtcgggcaatcaggtgcgacaatctatcgcttgtatgggaagcccgatgcgccagagttgtttctgaaacatggcaaaggtagcgttgccaatgatgttacagatgagatggtcagactaaactggctgacggaatttatgcctcttccgaccatcaagcattttatccgtactcctgatgatgcatggttactcaccactgcgatccccggaaaaacagcattccaggtattagaagaatatcctgattcaggtgaaaatattgttgatgcgctggcagtgttcctgcgccggttgcattcgattcctgtttgtaattgtccttttaacagcgatcgcgtatttcgtctcgctcaggcgcaatcacgaatgaataacggtttggttgatgcgagtgattttgatgacgagcgtaatggctggcctgttgaacaagtctggaaagaaatgcataaacttttgccattctcaccggattcagtcgtcactcatggtgatttctcacttgataaccttatttttgacgaggggaaattaataggttgtattgatgttggacgagtcggaatcgcagaccgataccaggatcttgccatcctatggaactgcctcggtgagttttctccttcattacagaaacggctttttcaaaaatatggtattgataatcctgatatgaataaattgcagtttcatttgatgctcgatgagtttttctaagcgtataatggtctagagctagcatatggatccatcgattccattatacgcctgtcagaccaagtttactcatatatactttagattgatttaaaacttcatttttaatttaaaaggatctaggtgaagatcctttttgataatctcatgaccaaaatcccttaacgtgagttttcgttccactgagcgtcagaccccgtagaaaagatcaaaggatcttcttgagatcctttttttctgcgcgtaatctgctgcttgcaaacaaaaaaaccaccgctaccagcggtggtttgtttgccggatcaagagctaccaactctttttccgaaggtaactggcttcagcagagcgcagataccaaatactgttcttctagtgtagccgtagttaggccaccacttcaagaactctgtagcaccgcctacatacctcgctctgctaatcctgttaccagtggctgctgccagtggcgataagtcgtgtcttaccgggttggactcaagacgatagttaccggataaggcgcagcggtcgggctgaacggggggttcgtgcacacagcccagcttggagcgaacgacctacaccgaactgagatacctacagcgtgagctatgagaaagcgccacgcttcccgaagggagaaaggcggacaggtatccggtaagcggcagggtcggaacaggagagcgcacgagggagcttccagggggaaacgcctggtatctttatagtcctgtcgggtttcgccacctctgacttgagcgtcgatttttgtgatgctcgtcaggggggcggagcctatggaaaaacgccagcaacgcggcctttttacggttcctggcctttttttcctgcagcccgggggatccaagttctagagcccgccaccgcggtggagctcgctcacatgttctttcctgcgttatcccctgattctgtggataaccgtattaccgcctttgagtgagctgataccgctcgccgcagccgaacgaccgagcgcagcgagtcagtgagcgaggaagcggaagagcgcccaatacgcaaaccgcctctccccgcgcgttggccgattcattaatg

SEQ ID NO: 382 - DNA, 5969 bp, Artificial Sequence
  Description of Artificial Sequence: Synthetic polynucleotide
  I-1c.v26 (I-I+B)
cagctggcgtaatagcgaagaggcccgcaccgatcgcccttcccaacagttgcgcagcctgaatggcgaatggcgattccgttgcaatggctggcggtaatattgttctggatattaccagcaaggccgatagtttgagttcttctactcaggcaagtgatgttattactaatcaaagaagtattgcgacaacggttaatttgcgtgatggacagactcttttactcggtggcctcactgattataaaaacacttctcaggattctggcgtaccgttcctgtctaaaatccctttaatcggcctcctgtttagctcccgctctgattctaacgaggaaagcacgttatacgtgctcgtcaaagcaaccatagtacgcgccctgtagcggcgcattaagcgcggcgggtgtggtggttacgcgcagcgtgaccgctacacttgccagcgccctagcgcccgctcctttcgctttcttcccttcctttctcgccacgttcgccggctttccccgtcaagctctaaatcgggggctccctttagggttccgatttagtgctttacggcacctcgaccccaaaaaacttgattagggtgatggttcacgtagtgggccatcgccctgatagacggtttttcgccctttgacgttggagtccacgttctttaatagtggactcttgttccaaactggaacaacactcaaccctatctcggtctattcttttgatttataagggattttgccgatttcggcctattggttaaaaaatgagctgatttaacaaaaatttaacgcgaattttaacaaaatattaacgcttacaatttaaatatttgcttatacaatcttcctgtttttggggcttttctgattatcaaccggggtacatatgattgacatgctagttttacgattaccgttcatcgtctagagctagcatatggatccatcgatttagggataacagggtaattatcagcacacaattgcccattatacgcgcgtataatggactattgtgtgctgatatctgtacacttaagggctagatcttagcttacgtcactagagggtccacgtttagtttttaagatccattgatctcctaaacgctgcaagattcgcaacctggtatacttagcctaggcgctaggtcctagtgcagcgggactttttttctaaagtcgttgagaggaggagtcgtcagaccagatagctttgatgtcctgatcggaaggatcgttggcccccctgcaggcagctgttaattaaccgattcattaatgcagcagctgcgcgctcgctcgctcactgaggccgcccgggcaaagcccgggcgtcgggcgacctttggtcgcccggcctcagtgagcgagcgagcgcgcagagagggagtggcgcgccacgcgtggatctaatagtaatcaattacggggtcattagttcatagcccatatatggagttccgcgttacataacttacggtaaatggcccgcctggctgaccgcccaacgacccccgcccattgacgtcaataatgacgtatgttcccatagtaacgccaatagggactttccattgacgtcaatgggtggagtatttacggtaaactgcccacttggcagtacatcaagtgtatcatatgccaagtccgccccctattgacgtcaatgacggtaaatggcccgcctggcattatgcccagtacatgaccttacgggactttcctacttggcagtacatctacgtattagtcatcgctattaccatggtgatgcggttttggcagtacaccaatgggcgtggatagcggtttgactcacggggatttccaagtctccaccccattgacgtcaatgggagtttgttttggcaccaaaatcaacgggactttccaaaatgtcgtaataaccccgccccgttgacgcaaatgggcggtaggcgtgtacggtgggaggtctatataagcagagctcgtttagtgaaccgtcagatcactagtgcttctgacacaacagtctcgaacttaagctgcagaagttggtcgtgaggcactgggcaggtaagtatcaaggttacaagacaggtttaaggagaccaatagaaactgggcttgtcgagacagagaagactcttgcgtttctgataggcacctattggtcttactgacatccactttgcctttctctccacaggtgtccactcccagttcaatagtactgccaccatggaacaggacaacagccccaggaagatccagttcacagtgcccctgctggaaccccacctggaccctgaggctgctgagcagatcaggaggagaaggcctgaccctgccaccctggtgctgaccagtgaccagagcagccctgagattgacgaggacaggattcccaacccccacctgaagagcaccctggcctgataattcgaagggccgcgacactagatcataatcagccataccacatttgtagaggttttacttgctttaaaaaacctcccacacctccccctgaacctgaaacataaaatgaatgcaattgttgttgttaacttgtttattgcagcttataatggttacaaataaagcaatagcatcacaaatttcacaaataaagcatttttttcactgcattctagttgtggtttgtccaaactcatcaatgtatcttaaggcgggaattgatctgtttaaacgcggccgcaggaacccctagtgatggagttggccactccctctctgcgcgctcgctcgctcactgaggccgggcgaccaaaggtcgcccgacgcccgggctttgcccgggcggcctcagtgagcgagcgagcgcgcagagagggagtggccaactggcgtaatagcgaagaggttaattaaggcgccctaggccgacccttagactctgtactcagttctataaacgagccattggatacgagatccgtagattgataagggacacggaatatccccggacgcaatagacaccggtggacagcttggtatcctgagcacagtcgcgcgtccgaatctagctctactttagaggccccggattctgatggtcgtagaccgcagaaccgattggggggatgagatctactagttatcagcacacaattgcccattatacgcgcgtataatggactattgtgtgctgatatagggataacagggtaattctagagctagcatatggatccatcgatttattctcttgtttgctccagactctcaggcaatgacctgatagcctttgtagagacctctcaaaaatagctaccctctccggcatgaatttatcagctagaacggttgaatatcatattgatggtgatttgactgtctccggcctttctcacccgtttgaatctttacctacacattactcaggcattgcatttaaaatatatgagggttctaaaaatttttatccttgcgttgaaataaaggcttctcccgcaaaagtattacagggtcataatgtttttggtacaaccgatttagctttatgctctgaggctttattgcttaattttgctaattctttgccttgcctgtatgatttattggatgttggaatcgcctgatgcggtattttctccttacgcatctgtgcggtatttcacaccgcatatggtgcactctcagtacaatctgctctgatgccgcatagttaagccagccccgacacccgccaacacccgctgacgcgccctgacgggcttgtctgctcccggcatccgcttacagacaagctgtgaccgtctccgggagctgcatgtgtcagaggttttcaccgtcatcaccgaaacgcgcgagacgaaagggcctcgtgatacgcctatttttataggttaatgtcatgataataatggtttcttagacgtcagggtaccgggccccccctcgaggtcgacggtatcgataagcttgatatcgaattcctcggggaaatgtgcgcggaacccctatttgtttatttttctaaatacattcaaatatgtatccgctcatgagacaataaccctgataaatgcttcaataatattgaaaaaggaagagtatgagccatattcaacgggaaacgtcgaggccgcgattaaattccaacatggatgctgatttatatgggtataaatgggctcgcgataatgtcgggcaatcaggtgcgacaatctatcgcttgtatgggaagcccgatgcgccagagttgtttctgaaacatggcaaaggtagcgttgccaatgatgttacagatgagatggtcagactaaactggctgacggaatttatgcctcttccgaccatcaagcattttatccgtactcctgatgatgcatggttactcaccactgcgatccccggaaaaacagcattccaggtattagaagaatatcctgattcaggtgaaaatattgttgatgcgctggcagtgttcctgcgccggttgcattcgattcctgtttgtaattgtccttttaacagcgatcgcgtatttcgtctcgctcaggcgcaatcacgaatgaataacggtttggttgatgcgagtgattttgatgacgagcgtaatggctggcctgttgaacaagtctggaaagaaatgcataaacttttgccattctcaccggattcagtcgtcactcatggtgatttctcacttgataaccttatttttgacgaggggaaattaataggttgtattgatgttggacgagtcggaatcgcagaccgataccaggatcttgccatcctatggaactgcctcggtgagttttctccttcattacagaaacggctttttcaaaaatatggtattgataatcctgatatgaataaattgcagtttcatttgatgctcgatgagtttttctaagcgtataatggtctagagctagcatatggatccatcgattccattatacgcctgtcagaccaagtttactcatatatactttagattgatttaaaacttcatttttaatttaaaaggatctaggtgaagatcctttttgataatctcatgaccaaaatcccttaacgtgagttttcgttccactgagcgtcagaccccgtagaaaagatcaaaggatcttcttgagatcctttttttctgcgcgtaatctgctgcttgcaaacaaaaaaaccaccgctaccagcggtggtttgtttgccggatcaagagctaccaactctttttccgaaggtaactggcttcagcagagcgcagataccaaatactgttcttctagtgtagccgtagttaggccaccacttcaagaactctgtagcaccgcctacatacctcgctctgctaatcctgttaccagtggctgctgccagtggcgataagtcgtgtcttaccgggttggactcaagacgatagttaccggataaggcgcagcggtcgggctgaacggggggttcgtgcacacagcccagcttggagcgaacgacctacaccgaactgagatacctacagcgtgagctatgagaaagcgccacgcttcccgaagggagaaaggcggacaggtatccggtaagcggcagggtcggaacaggagagcgcacgagggagcttccagggggaaacgcctggtatctttatagtcctgtcgggtttcgccacctctgacttgagcgtcgatttttgtgatgctcgtcaggggggcggagcctatggaaaaacgccagcaacgcggcctttttacggttcctggcctttttttcctgcagcccgggggatccaagttctagagcccgccaccgcggtggagctcgctcacatgttctttcctgcgttatcccctgattctgtggataaccgtattaccgcctttgagtgagctgataccgctcgccgcagccgaacgaccgagcgcagcgagtcagtgagcgaggaagcggaagagcgcccaatacgcaaaccgcctctccccgcgcgttggccgattcattaatg

SEQ ID NO: 383 - DNA, 6390 bp, Artificial Sequence
  Description of Artificial Sequence: Synthetic polynucleotide
  I-1c.v27 (I-I+B)
cagctggcgtaatagcgaagaggcccgcaccgatcgcccttcccaacagttgcgcagcctgaatggcgaatggcgattccgttgcaatggctggcggtaatattgttctggatattaccagcaaggccgatagtttgagttcttctactcaggcaagtgatgttattactaatcaaagaagtattgcgacaacggttaatttgcgtgatggacagactcttttactcggtggcctcactgattataaaaacacttctcaggattctggcgtaccgttcctgtctaaaatccctttaatcggcctcctgtttagctcccgctctgattctaacgaggaaagcacgttatacgtgctcgtcaaagcaaccatagtacgcgccctgtagcggcgcattaagcgcggcgggtgtggtggttacgcgcagcgtgaccgctacacttgccagcgccctagcgcccgctcctttcgctttcttcccttcctttctcgccacgttcgccggctttccccgtcaagctctaaatcgggggctccctttagggttccgatttagtgctttacggcacctcgaccccaaaaaacttgattagggtgatggttcacgtagtgggccatcgccctgatagacggtttttcgccctttgacgttggagtccacgttctttaatagtggactcttgttccaaactggaacaacactcaaccctatctcggtctattcttttgatttataagggattttgccgatttcggcctattggttaaaaaatgagctgatttaacaaaaatttaacgcgaattttaacaaaatattaacgcttacaatttaaatatttgcttatacaatcttcctgtttttggggcttttctgattatcaaccggggtacatatgattgacatgctagttttacgattaccgttcatcgtctagagctagcatatggatccatcgatttagggataacagggtaattatcagcacacaattgcccattatacgcgcgtataatggactattgtgtgctgatatctgtacacttaagggctagatcttagcttacgtcactagagggtccacgtttagtttttaagatccattgatctcctaaacgctgcaagattcgcaacctggtatacttagcctaggcgctaggtcctagtgcagcgggactttttttctaaagtcgttgagaggaggagtcgtcagaccagatagctttgatgtcctgatcggaaggatcgttggcccccctgcaggcagctgttaattaaccgattcattaatgcagcagctgcgcgctcgctcgctcactgaggccgcccgggcaaagcccgggcgtcgggcgacctttggtcgcccggcctcagtgagcgagcgagcgcgcagagagggagtggcgcgccacgcgtggatctaatagtaatcaattacggggtcattagttcatagcccatatatggagttccgcgttacataacttacggtaaatggcccgcctggctgaccgcccaacgacccccgcccattgacgtcaataatgacgtatgttcccatagtaacgccaatagggactttccattgacgtcaatgggtggagtatttacggtaaactgcccacttggcagtacatcaagtgtatcatatgccaagtccgccccctattgacgtcaatgacggtaaatggcccgcctggcattatgcccagtacatgaccttacgggactttcctacttggcagtacatctacgtattagtcatcgctattaccatggtgatgcggttttggcagtacaccaatgggcgtggatagcggtttgactcacggggatttccaagtctccaccccattgacgtcaatgggagtttgttttggcaccaaaatcaacgggactttccaaaatgtcgtaataaccccgccccgttgacgcaaatgggcggtaggcgtgtacggtgggaggtctatataagcagagctcgtttagtgaaccgtcagatcactagtgcttctgacacaacagtctcgaacttaagctgcagaagttggtcgtgaggcactgggcaggtaagtatcaaggttacaagacaggtttaaggagaccaatagaaactgggcttgtcgagacagagaagactcttgcgtttctgataggcacctattggtcttactgacatccactttgcctttctctccacaggtgtccactcccagttcaatagtactgccaccatggaacaggacaacagccccagaaagatccagttcactgtgcccctgctggaaccccacctggacccagaggcagcagagcagatcagaagaagaaggccagacccagccaccctggtgctgacctctgaccagagcagcccagagattgacgaggacagaatccccaacccccacctgaagagcaccctggcctgataattcgaactgatcacttttttaataaaaggggcatttggaaaaaaaaaaaaaaggtagcagtcgacagatgaattctgcagatctgtggcttctagctgcccgggtggcatccctgtgacccctccccagtgcctctcctggccctggaagttgccactccagtgcccaccagccttgtcctaataaaattaagttgcatcattttgtctgactaggtgtccttctataatattatggggtggaggggggtggtatggagcaaggggcaagttgggaagacaacctgtagggcctgcggggtctattgggaaccaagctggagtgcagtggcacaatcttggctcactgcaatctccgcctcctgggttcaagcgattctcctgcctcagcctcccgagttgttgggattccaggcatgcatgaccaggctcagctaatttttgtttttttggtagagacggggtttcaccatattggccaggctggtctccaactcctaatctcaggtgatctacccaccttggcctcccaaattgctgggattacaggcgtgaaccactgctcccttccctgtccttctgattttaaaaaaaagagaaatgttctggcacctgcacttgcactggggacagcctattttgctagtttgttttgtttcgttttgttttgatggagagcgtatgttgtttaaacgcggccgcaggaacccctagtgatggagttggccactccctctctgcgcgctcgctcgctcactgaggccgggcgaccaaaggtcgcccgacgcccgggctttgcccgggcggcctcagtgagcgagcgagcgcgcagagagggagtggccaactggcgtaatagcgaagaggttaattaaggcgccctaggccgacccttagactctgtactcagttctataaacgagccattggatacgagatccgtagattgataagggacacggaatatccccggacgcaatagacaccggtggacagcttggtatcctgagcacagtcgcgcgtccgaatctagctctactttagaggccccggattctgatggtcgtagaccgcagaaccgattggggggatgagatctactagttatcagcacacaattgcccattatacgcgcgtataatggactattgtgtgctgatatagggataacagggtaattctagagctagcatatggatccatcgatttattctcttgtttgctccagactctcaggcaatgacctgatagcctttgtagagacctctcaaaaatagctaccctctccggcatgaatttatcagctagaacggttgaatatcatattgatggtgatttgactgtctccggcctttctcacccgtttgaatctttacctacacattactcaggcattgcatttaaaatatatgagggttctaaaaatttttatccttgcgttgaaataaaggcttctcccgcaaaagtattacagggtcataatgtttttggtacaaccgatttagctttatgctctgaggctttattgcttaattttgctaattctttgccttgcctgtatgatttattggatgttggaatcgcctgatgcggtattttctccttacgcatctgtgcggtatttcacaccgcatatggtgcactctcagtacaatctgctctgatgccgcatagttaagccagccccgacacccgccaacacccgctgacgcgccctgacgggcttgtctgctcccggcatccgcttacagacaagctgtgaccgtctccgggagctgcatgtgtcagaggttttcaccgtcatcaccgaaacgcgcgagacgaaagggcctcgtgatacgcctatttttataggttaatgtcatgataataatggtttcttagacgtcagggtaccgggccccccctcgaggtcgacggtatcgataagcttgatatcgaattcctcggggaaatgtgcgcggaacccctatttgtttatttttctaaatacattcaaatatgtatccgctcatgagacaataaccctgataaatgcttcaataatattgaaaaaggaagagtatgagccatattcaacgggaaacgtcgaggccgcgattaaattccaacatggatgctgatttatatgggtataaatgggctcgcgataatgtcgggcaatcaggtgcgacaatctatcgcttgtatgggaagcccgatgcgccagagttgtttctgaaacatggcaaaggtagcgttgccaatgatgttacagatgagatggtcagactaaactggctgacggaatttatgcctcttccgaccatcaagcattttatccgtactcctgatgatgcatggttactcaccactgcgatccccggaaaaacagcattccaggtattagaagaatatcctgattcaggtgaaaatattgttgatgcgctggcagtgttcctgcgccggttgcattcgattcctgtttgtaattgtccttttaacagcgatcgcgtatttcgtctcgctcaggcgcaatcacgaatgaataacggtttggttgatgcgagtgattttgatgacgagcgtaatggctggcctgttgaacaagtctggaaagaaatgcataaacttttgccattctcaccggattcagtcgtcactcatggtgatttctcacttgataaccttatttttgacgaggggaaattaataggttgtattgatgttggacgagtcggaatcgcagaccgataccaggatcttgccatcctatggaactgcctcggtgagttttctccttcattacagaaacggctttttcaaaaatatggtattgataatcctgatatgaataaattgcagtttcatttgatgctcgatgagtttttctaagcgtataatggtctagagctagcatatggatccatcgattccattatacgcctgtcagaccaagtttactcatatatactttagattgatttaaaacttcatttttaatttaaaaggatctaggtgaagatcctttttgataatctcatgaccaaaatcccttaacgtgagttttcgttccactgagcgtcagaccccgtagaaaagatcaaaggatcttcttgagatcctttttttctgcgcgtaatctgctgcttgcaaacaaaaaaaccaccgctaccagcggtggtttgtttgccggatcaagagctaccaactctttttccgaaggtaactggcttcagcagagcgcagataccaaatactgttcttctagtgtagccgtagttaggccaccacttcaagaactctgtagcaccgcctacatacctcgctctgctaatcctgttaccagtggctgctgccagtggcgataagtcgtgtcttaccgggttggactcaagacgatagttaccggataaggcgcagcggtcgggctgaacggggggttcgtgcacacagcccagcttggagcgaacgacctacaccgaactgagatacctacagcgtgagctatgagaaagcgccacgcttcccgaagggagaaaggcggacaggtatccggtaagcggcagggtcggaacaggagagcgcacgagggagcttccagggggaaacgcctggtatctttatagtcctgtcgggtttcgccacctctgacttgagcgtcgatttttgtgatgctcgtcaggggggcggagcctatggaaaaacgccagcaacgcggcctttttacggttcctggcctttttttcctgcagcccgggggatccaagttctagagcccgccaccgcggtggagctcgctcacatgttctttcctgcgttatcccctgattctgtggataaccgtattaccgcctttgagtgagctgataccgctcgccgcagccgaacgaccgagcgcagcgagtcagtgagcgaggaagcggaagagcgcccaatacgcaaaccgcctctccccgcgcgttggccgattcattaatg

SEQ ID NO: 384 - DNA, 5969 bp, Artificial Sequence
  Description of Artificial Sequence: Synthetic polynucleotide
  I-1c.v28 (I-I+B)
cagctggcgtaatagcgaagaggcccgcaccgatcgcccttcccaacagttgcgcagcctgaatggcgaatggcgattccgttgcaatggctggcggtaatattgttctggatattaccagcaaggccgatagtttgagttcttctactcaggcaagtgatgttattactaatcaaagaagtattgcgacaacggttaatttgcgtgatggacagactcttttactcggtggcctcactgattataaaaacacttctcaggattctggcgtaccgttcctgtctaaaatccctttaatcggcctcctgtttagctcccgctctgattctaacgaggaaagcacgttatacgtgctcgtcaaagcaaccatagtacgcgccctgtagcggcgcattaagcgcggcgggtgtggtggttacgcgcagcgtgaccgctacacttgccagcgccctagcgcccgctcctttcgctttcttcccttcctttctcgccacgttcgccggctttccccgtcaagctctaaatcgggggctccctttagggttccgatttagtgctttacggcacctcgaccccaaaaaacttgattagggtgatggttcacgtagtgggccatcgccctgatagacggtttttcgccctttgacgttggagtccacgttctttaatagtggactcttgttccaaactggaacaacactcaaccctatctcggtctattcttttgatttataagggattttgccgatttcggcctattggttaaaaaatgagctgatttaacaaaaatttaacgcgaattttaacaaaatattaacgcttacaatttaaatatttgcttatacaatcttcctgtttttggggcttttctgattatcaaccggggtacatatgattgacatgctagttttacgattaccgttcatcgtctagagctagcatatggatccatcgatttagggataacagggtaattatcagcacacaattgcccattatacgcgcgtataatggactattgtgtgctgatatctgtacacttaagggctagatcttagcttacgtcactagagggtccacgtttagtttttaagatccattgatctcctaaacgctgcaagattcgcaacctggtatacttagcctaggcgctaggtcctagtgcagcgggactttttttctaaagtcgttgagaggaggagtcgtcagaccagatagctttgatgtcctgatcggaaggatcgttggcccccctgcaggcagctgttaattaaccgattcattaatgcagcagctgcgcgctcgctcgctcactgaggccgcccgggcaaagcccgggcgtcgggcgacctttggtcgcccggcctcagtgagcgagcgagcgcgcagagagggagtggcgcgccacgcgtggatctaatagtaatcaattacggggtcattagttcatagcccatatatggagttccgcgttacataacttacggtaaatggcccgcctggctgaccgcccaacgacccccgcccattgacgtcaataatgacgtatgttcccatagtaacgccaatagggactttccattgacgtcaatgggtggagtatttacggtaaactgcccacttggcagtacatcaagtgtatcatatgccaagtccgccccctattgacgtcaatgacggtaaatggcccgcctggcattatgcccagtacatgaccttacgggactttcctacttggcagtacatctacgtattagtcatcgctattaccatggtgatgcggttttggcagtacaccaatgggcgtggatagcggtttgactcacggggatttccaagtctccaccccattgacgtcaatgggagtttgttttggcaccaaaatcaacgggactttccaaaatgtcgtaataaccccgccccgttgacgcaaatgggcggtaggcgtgtacggtgggaggtctatataagcagagctcgtttagtgaaccgtcagatcactagtgcttctgacacaacagtctcgaacttaagctgcagaagttggtcgtgaggcactgggcaggtaagtatcaaggttacaagacaggtttaaggagaccaatagaaactgggcttgtcgagacagagaagactcttgcgtttctgataggcacctattggtcttactgacatccactttgcctttctctccacaggtgtccactcccagttcaatagtactgccaccatggaacaggacaacagccccagaaagatccagttcactgtgcccctgctggaaccccacctggacccagaggcagcagagcagatcagaagaagaaggccagacccagccaccctggtgctgacctctgaccagagcagcccagagattgacgaggacagaatccccaacccccacctgaagagcaccctggcctgataattcgaagggccgcgacactagatcataatcagccataccacatttgtagaggttttacttgctttaaaaaacctcccacacctccccctgaacctgaaacataaaatgaatgcaattgttgttgttaacttgtttattgcagcttataatggttacaaataaagcaatagcatcacaaatttcacaaataaagcatttttttcactgcattctagttgtggtttgtccaaactcatcaatgtatcttaaggcgggaattgatctgtttaaacgcggccgcaggaacccctagtgatggagttggccactccctctctgcgcgctcgctcgctcactgaggccgggcgaccaaaggtcgcccgacgcccgggctttgcccgggcggcctcagtgagcgagcgagcgcgcagagagggagtggccaactggcgtaatagcgaagaggttaattaaggcgccctaggccgacccttagactctgtactcagttctataaacgagccattggatacgagatccgtagattgataagggacacggaatatccccggacgcaatagacaccggtggacagcttggtatcctgagcacagtcgcgcgtccgaatctagctctactttagaggccccggattctgatggtcgtagaccgcagaaccgattggggggatgagatctactagttatcagcacacaattgcccattatacgcgcgtataatggactattgtgtgctgatatagggataacagggtaattctagagctagcatatggatccatcgatttattctcttgtttgctccagactctcaggcaatgacctgatagcctttgtagagacctctcaaaaatagctaccctctccggcatgaatttatcagctagaacggttgaatatcatattgatggtgatttgactgtctccggcctttctcacccgtttgaatctttacctacacattactcaggcattgcatttaaaatatatgagggttctaaaaatttttatccttgcgttgaaataaaggcttctcccgcaaaagtattacagggtcataatgtttttggtacaaccgatttagctttatgctctgaggctttattgcttaattttgctaattctttgccttgcctgtatgatttattggatgttggaatcgcctgatgcggtattttctccttacgcatctgtgcggtatttcacaccgcatatggtgcactctcagtacaatctgctctgatgccgcatagttaagccagccccgacacccgccaacacccgctgacgcgccctgacgggcttgtctgctcccggcatccgcttacagacaagctgtgaccgtctccgggagctgcatgtgtcagaggttttcaccgtcatcaccgaaacgcgcgagacgaaagggcctcgtgatacgcctatttttataggttaatgtcatgataataatggtttcttagacgtcagggtaccgggccccccctcgaggtcgacggtatcgataagcttgatatcgaattcctcggggaaatgtgcgcggaacccctatttgtttatttttctaaatacattcaaatatgtatccgctcatgagacaataaccctgataaatgcttcaataatattgaaaaaggaagagtatgagccatattcaacgggaaacgtcgaggccgcgattaaattccaacatggatgctgatttatatgggtataaatgggctcgcgataatgtcgggcaatcaggtgcgacaatctatcgcttgtatgggaagcccgatgcgccagagttgtttctgaaacatggcaaaggtagcgttgccaatgatgttacagatgagatggtcagactaaactggctgacggaatttatgcctcttccgaccatcaagcattttatccgtactcctgatgatgcatggttactcaccactgcgatccccggaaaaacagcattccaggtattagaagaatatcctgattcaggtgaaaatattgttgatgcgctggcagtgttcctgcgccggttgcattcgattcctgtttgtaattgtccttttaacagcgatcgcgtatttcgtctcgctcaggcgcaatcacgaatgaataacggtttggttgatgcgagtgattttgatgacgagcgtaatggctggcctgttgaacaagtctggaaagaaatgcataaacttttgccattctcaccggattcagtcgtcactcatggtgatttctcacttgataaccttatttttgacgaggggaaattaataggttgtattgatgttggacgagtcggaatcgcagaccgataccaggatcttgccatcctatggaactgcctcggtgagttttctccttcattacagaaacggctttttcaaaaatatggtattgataatcctgatatgaataaattgcagtttcatttgatgctcgatgagtttttctaagcgtataatggtctagagctagcatatggatccatcgattccattatacgcctgtcagaccaagtttactcatatatactttagattgatttaaaacttcatttttaatttaaaaggatctaggtgaagatcctttttgataatctcatgaccaaaatcccttaacgtgagttttcgttccactgagcgtcagaccccgtagaaaagatcaaaggatcttcttgagatcctttttttctgcgcgtaatctgctgcttgcaaacaaaaaaaccaccgctaccagcggtggtttgtttgccggatcaagagctaccaactctttttccgaaggtaactggcttcagcagagcgcagataccaaatactgttcttctagtgtagccgtagttaggccaccacttcaagaactctgtagcaccgcctacatacctcgctctgctaatcctgttaccagtggctgctgccagtggcgataagtcgtgtcttaccgggttggactcaagacgatagttaccggataaggcgcagcggtcgggctgaacggggggttcgtgcacacagcccagcttggagcgaacgacctacaccgaactgagatacctacagcgtgagctatgagaaagcgccacgcttcccgaagggagaaaggcggacaggtatccggtaagcggcagggtcggaacaggagagcgcacgagggagcttccagggggaaacgcctggtatctttatagtcctgtcgggtttcgccacctctgacttgagcgtcgatttttgtgatgctcgtcaggggggcggagcctatggaaaaacgccagcaacgcggcctttttacggttcctggcctttttttcctgcagcccgggggatccaagttctagagcccgccaccgcggtggagctcgctcacatgttctttcctgcgttatcccctgattctgtggataaccgtattaccgcctttgagtgagctgataccgctcgccgcagccgaacgaccgagcgcagcgagtcagtgagcgaggaagcggaagagcgcccaatacgcaaaccgcctctccccgcgcgttggccgattcattaatg

SEQ ID NO: 385 - DNA, 201 bp, Artificial Sequence
  Description of Artificial Sequence: Synthetic polynucleotide
  I-1c.v1 (co)
atggaacaggacaacagcccccggaagatccagttcaccgtgcccctgctggaaccccacctggaccccgaggccgccgagcagatccggcggagaaggcccgaccccgccaccctggtgctgaccagcgaccagagcagccccgagatcgacgaggaccggatccccaacccccacctgaagagcaccctggcctgatga

SEQ ID NO: 386 - DNA, 201 bp, Artificial Sequence
  Description of Artificial Sequence: Synthetic polynucleotide
  I-1c.v2 (co)
atggaacaggacaacagccccaggaagatccagttcacagtgcccctgctggaaccccacctggaccctgaggctgctgagcagatcaggaggagaaggcctgaccctgccaccctggtgctgaccagtgaccagagcagccctgagattgatgaggacaggatccccaacccccacctgaagagcaccctggcctgataa

SEQ ID NO: 387 - DNA, 201 bp, Artificial Sequence
  Description of Artificial Sequence: Synthetic polynucleotide
  I-1c.v3 (co)
atggaacaggacaacagccccaggaagatccagttcacagtgcccctgctggaaccccacctggaccctgaggctgctgagcagatcaggaggagaaggcctgaccctgccaccctggtgctgaccagtgaccagagcagccctgagattgacgaggacaggatccccaacccccacctgaagagcaccctggcctgataa

SEQ ID NO: 388 - DNA, 201 bp, Artificial Sequence
  Description of Artificial Sequence: Synthetic polynucleotide
  I-1c.v4 (co)
atggaacaggacaacagccccagaaagatccagttcactgtgcccctgctggaaccccacctggacccagaggcagcagagcagatcagaagaagaaggccagacccagccaccctggtgctgacctctgaccagagcagcccagagattgatgaggacagaatccccaacccccacctgaagagcaccctggcctgataa

SEQ ID NO: 389 - DNA, 201 bp, Artificial Sequence; identical to SEQ ID NO: 385
  Description of Artificial Sequence: Synthetic polynucleotide
  I-1c.v5 (co)

SEQ ID NO: 390 - DNA, 201 bp, Artificial Sequence; identical to SEQ ID NO: 386
  Description of Artificial Sequence: Synthetic polynucleotide
  I-1c.v6 (co)

SEQ ID NO: 391 - DNA, 201 bp, Artificial Sequence; identical to SEQ ID NO: 387
  Description of Artificial Sequence: Synthetic polynucleotide
  I-1c.v7 (co)

SEQ ID NO: 392 - DNA, 201 bp, Artificial Sequence; identical to SEQ ID NO: 388
  Description of Artificial Sequence: Synthetic polynucleotide
  I-1c.v8 (co)

SEQ ID NO: 393 - DNA, 201 bp, Artificial Sequence; identical to SEQ ID NO: 386
  Description of Artificial Sequence: Synthetic polynucleotide
  I-1c.v9 (co)

SEQ ID NO: 394 - DNA, 201 bp, Artificial Sequence; identical to SEQ ID NO: 385
  Description of Artificial Sequence: Synthetic polynucleotide
  I-1c.v10 (co)

SEQ ID NO: 395 - DNA, 198 bp, Artificial Sequence
  Description of Artificial Sequence: Synthetic polynucleotide
  I-1c.v11 (co)
atggagcaggacaacagccccagaaagatccagttcactgtgcccctgctggagccccacctggaccctgaggcagcagagcagatcagaagaagaagacctgaccctgccaccctggtgctgacctctgaccagagcagccctgagattgacgaggacagaatccccaacccccacctgaagagcaccctggcctga

SEQ ID NO: 396 - DNA, 201 bp, Artificial Sequence
  Description of Artificial Sequence: Synthetic polynucleotide
  I-1c.v12 (co)
atggaacaagacaactcccccagaaagatacagttcactgtgcccctgctggagcctcacctggaccctgaggcagcagagcagatcagaagaaggagaccagaccctgccaccctggtgctcacttctgaccagagcagtcctgaaattgacgaagacagaattcctaacccccacctaaagtccaccctggcctgataa

SEQ ID NO: 397 - DNA, 201 bp, Artificial Sequence
  Description of Artificial Sequence: Synthetic polynucleotide
  I-1c.v13 (co)
atggagcaggacaacagcccaaggaagatccagttcactgtgccactgctggagccacacctggacccagaggcagcagagcagatcagaagaagaagaccagacccagccaccctggtgctgacctctgaccagagcagcccagagattgacgaggacagaatcccaaacccacacctgaagagcaccctggcctgataa

SEQ ID NO: 398 - DNA, 201 bp, Artificial Sequence
  Description of Artificial Sequence: Synthetic polynucleotide
  I-1c.v14 (co)
atggagcaggataactccccaaggaagatccagtttactgtgccactgctggaaccccacctggacccagaagctgcagagcagatcagaagaaggaggccagacccagccaccctggtgctgacttctgatcagtcaagtccagagattgacgaggataggattccaaatccccacctgaagtccaccctggcctgataa

SEQ ID NO: 399 - DNA, 201 bp, Artificial Sequence
  Description of Artificial Sequence: Synthetic polynucleotide
  I-1c.v15 (co)
atggagcaggataattctcctagaaagattcagtttacagtgcctttgttggagcctcacttagatcctgaggctgctgagcagattagaagaagaagacctgatcctgctacattggtgttgacatctgatcagtcttctcctgagattgacgaggatagaattcctaatcctcacttgaagtctacattggcttgataa

SEQ ID NO: 400 - DNA, 201 bp, Artificial Sequence
  Description of Artificial Sequence: Synthetic polynucleotide
  I-1c.v16 (co)
atggagcaggataattcacctagaaagattcaatttactgtacctttgcttgagcctcacctagatcctgaagcagctgaacaaattaggaggagaaggccagatcctgctacactggttttaacatctgatcagtctagtccagaaattgacgaggatagaatacctaatcctcacttgaaatctacattggcctgataa

SEQ ID NO: 401 - DNA, 201 bp, Artificial Sequence
  Description of Artificial Sequence: Synthetic polynucleotide
  I-1c.v17 (co)
atggaacaagataatagtccaaggaaaattcaatttactgttccactgctggaaccacaccttgatccagaagcagcagaacaaattaggaggaggaggccagatccagcaactctggttctgactagtgatcaaagtagtccagaaattgacgaagataggattccaaatccacacctgaaaagcactctggcctgataa

SEQ ID NO: 402 - DNA, 201 bp, Artificial Sequence
  Description of Artificial Sequence: Synthetic polynucleotide
  I-1c.v18 (co)
atggagcaagataattctccaagaaagatacagtttactgttcctctacttgaacctcatcttgatccagaagcagctgaacaaattaggagaaggaggccagatcctgctactttagtgctgacatcagatcaaagtagtccagaaattgacgaggataggatacctaatccacacctaaaatcaactttagcctgataa

SEQ ID NO: 403 - DNA, 201 bp, Artificial Sequence
  Description of Artificial Sequence: Synthetic polynucleotide
  I-1c.v19 (co)
atggagcaggacaacagccccaggaagatccagttcactgtgcccctgctggagccccacctggaccctgaggcagcagagcagatcaggaggaggaggcctgaccctgccaccctggtgctgacctctgaccagagcagccctgagattgacgaggacaggattcccaacccccacctgaagagcaccctggcctgataa

SEQ ID NO: 404 - DNA, 201 bp, Artificial Sequence
  Description of Artificial Sequence: Synthetic polynucleotide
  I-1c.v20 (co)
atggaacaggataacagtccaaggaaaattcagttcactgttccacttttagagcctcatttagaccctgaagctgcagaacagataagaagaagaagacctgaccctgctacacttgtgcttacaagtgatcagtctagcccagagatagacgaggatagaattcctaatccacacctcaaatcaaccctggcgtgataa

SEQ ID NO: 405 - DNA, 198 bp, Artificial Sequence
  Description of Artificial Sequence: Synthetic polynucleotide
  I-1c.v21 (co)
atggagcaagacaacagccccagaaagatccagttcactgtcccactgctggagccacaccttgacccagaggcagcagagcagattagaaggagaagacccgaccctgccacccttgtgctgaccagtgaccagtcttccccagagatagacgaagacagaatccccaacccacacctcaagtccactttggcgtga

SEQ ID NO: 406 - DNA, 198 bp, Artificial Sequence
  Description of Artificial Sequence: Synthetic polynucleotide
  I-1c.v22 (co)
atggagcaagacaacagcccccgaaagatccagttcacggtcccgctgctggagccgcaccttgaccccgaggcggcggagcagattcggaggcgccgccccgaccctgccaccctcgtgctgaccagtgaccagtcatccccagagatagatgaagaccggatccccaacccacatctcaagtccactttggcatga

SEQ ID NO: 407 - DNA, 201 bp, Artificial Sequence
  Description of Artificial Sequence: Synthetic polynucleotide
  I-1c.v23 (co)
atggaacaggacaacagcccccggaagatccagttcaccgtgcccctgctggaaccccacctggaccccgaggccgccgagcagatccggcggagaaggcccgaccccgccaccctggtgctgaccagcgaccagagcagccccgagatcgacgaggaccgaatccccaacccccacctgaagagcaccctggcctgatga

SEQ ID NO: 408 - DNA, 201 bp, Artificial Sequence; identical to SEQ ID NO: 407
  Description of Artificial Sequence: Synthetic polynucleotide
  I-1c.v24 (co)

SEQ ID NO: 409 - DNA, 201 bp, Artificial Sequence
  Description of Artificial Sequence: Synthetic polynucleotide
  I-1c.v25 (co)
atggaacaggacaacagccccaggaagatccagttcacagtgcccctgctggaaccccacctggaccctgaggctgctgagcagatcaggaggagaaggcctgaccctgccaccctggtgctgaccagtgaccagagcagccctgagattgacgaggacaggattcccaacccccacctgaagagcaccctggcctgataa

SEQ ID NO: 410 - DNA, 201 bp, Artificial Sequence; identical to SEQ ID NO: 409
  Description of Artificial Sequence: Synthetic polynucleotide
  I-1c.v26 (co)

SEQ ID NO: 411 - DNA, 201 bp, Artificial Sequence
  Description of Artificial Sequence: Synthetic polynucleotide
  I-1c.v27 (co)
atggaacaggacaacagccccagaaagatccagttcactgtgcccctgctggaaccccacctggacccagaggcagcagagcagatcagaagaagaaggccagacccagccaccctggtgctgacctctgaccagagcagcccagagattgacgaggacagaatccccaacccccacctgaagagcaccctggcctgataa

SEQ ID NO: 412 - DNA, 201 bp, Artificial Sequence; identical to SEQ ID NO: 411
  Description of Artificial Sequence: Synthetic polynucleotide
  I-1c.v28 (co)

SEQ ID NO: 413 - DNA, 2085 bp, Artificial Sequence
  Description of Artificial Sequence: Synthetic polynucleotide
  I-1c.v1 (I-to-I)
ctgcgcgctcgctcgctcactgaggccgcccgggcaaagcccgggcgtcgggcgacctttggtcgcccggcctcagtgagcgagcgagcgcgcagagagggagtggcgcgccacgcgtggatctaatagtaatcaattacggggtcattagttcatagcccatatatggagttccgcgttacataacttacggtaaatggcccgcctggctgaccgcccaacgacccccgcccattgacgtcaataatgacgtatgttcccatagtaacgccaatagggactttccattgacgtcaatgggtggagtatttacggtaaactgcccacttggcagtacatcaagtgtatcatatgccaagtccgccccctattgacgtcaatgacggtaaatggcccgcctggcattatgcccagtacatgaccttacgggactttcctacttggcagtacatctacgtattagtcatcgctattaccatggtgatgcggttttggcagtacaccaatgggcgtggatagcggtttgactcacggggatttccaagtctccaccccattgacgtcaatgggagtttgttttggcaccaaaatcaacgggactttccaaaatgtcgtaataaccccgccccgttgacgcaaatgggcggtaggcgtgtacggtgggaggtctatataagcagagctcgtttagtgaaccgtcagatcactagaagctttattgcggtagtttatcacagttaaattgctaacgcagtcagtgcttctgacacaacagtctcgaacttaagctgcagaagttggtcgtgaggcactgggcaggtaagtatcaaggttacaagacaggtttaaggagaccaatagaaactgggcttgtcgagacagagaagactcttgcgtttctgataggcacctattggtcttactgacatccactttgcctttctctccacaggtgtccactcccagttcaattacagctcttaaggctagagtacttaatacgactcactataggctagcctcgacggtaccgccaccatggaacaggacaacagcccccggaagatccagttcaccgtgcccctgctggaaccccacctggaccccgaggccgccgagcagatccggcggagaaggcccgaccccgccaccctggtgctgaccagcgaccagagcagccccgagatcgacgaggaccggatccccaacccccacctgaagagcaccctggcctgatgattcgaactgatcacttttttaataaaaggggcatttggaaaaaaaaaaaaaaggtagcagtcgacagatgaattctgcagatctgtggcttctagctgcccgggtggcatccctgtgacccctccccagtgcctctcctggccctggaagttgccactccagtgcccaccagccttgtcctaataaaattaagttgcatcattttgtctgactaggtgtccttctataatattatggggtggaggggggtggtatggagcaaggggcaagttgggaagacaacctgtagggcctgcggggtctattgggaaccaagctggagtgcagtggcacaatcttggctcactgcaatctccgcctcctgggttcaagcgattctcctgcctcagcctcccgagttgttgggattccaggcatgcatgaccaggctcagctaatttttgtttttttggtagagacggggtttcaccatattggccaggctggtctccaactcctaatctcaggtgatctacccaccttggcctcccaaattgctgggattacaggcgtgaaccactgctcccttccctgtccttctgattttaaaaaaaagagaaatgttctggcacctgcacttgcactggggacagcctattttgctagtttgttttgtttcgttttgttttgatggagagcgtatgttgtttaaacgcggccgcaggaacccctagtgatggagttggccactccctctctgcgcgctcgctcgctcactgaggccgggcgaccaaaggtcgcccgacgcccgggctttgcccgggcggcctcagtgagcgagcgagcgcgcagagagggagtggccaa

SEQ ID NO: 414 - DNA, 2085 bp, Artificial Sequence
  Description of Artificial Sequence: Synthetic polynucleotide
  I-1c.v2 (I-to-I)
ctgcgcgctcgctcgctcactgaggccgcccgggcaaagcccgggcgtcgggcgacctttggtcgcccggcctcagtgagcgagcgagcgcgcagagagggagtggcgcgccacgcgtggatctaatagtaatcaattacggggtcattagttcatagcccatatatggagttccgcgttacataacttacggtaaatggcccgcctggctgaccgcccaacgacccccgcccattgacgtcaataatgacgtatgttcccatagtaacgccaatagggactttccattgacgtcaatgggtggagtatttacggtaaactgcccacttggcagtacatcaagtgtatcatatgccaagtccgccccctattgacgtcaatgacggtaaatggcccgcctggcattatgcccagtacatgaccttacgggactttcctacttggcagtacatctacgtattagtcatcgctattaccatggtgatgcggttttggcagtacaccaatgggcgtggatagcggtttgactcacggggatttccaagtctccaccccattgacgtcaatgggagtttgttttggcaccaaaatcaacgggactttccaaaatgtcgtaataaccccgccccgttgacgcaaatgggcggtaggcgtgtacggtgggaggtctatataagcagagctcgtttagtgaaccgtcagatcactagaagctttattgcggtagtttatcacagttaaattgctaacgcagtcagtgcttctgacacaacagtctcgaacttaagctgcagaagttggtcgtgaggcactgggcaggtaagtatcaaggttacaagacaggtttaaggagaccaatagaaactgggcttgtcgagacagagaagactcttgcgtttctgataggcacctattggtcttactgacatccactttgcctttctctccacaggtgtccactcccagttcaattacagctcttaaggctagagtacttaatacgactcactataggctagcctctacggtaccgccaccatggaacaggacaacagccccaggaagatccagttcacagtgcccctgctggaaccccacctggaccctgaggctgctgagcagatcaggaggagaaggcctgaccctgccaccctggtgctgaccagtgaccagagcagccctgagattgatgaggacaggatccccaacccccacctgaagagcaccctggcctgataattcgaactgatcacttttttaataaaaggggcatttggaaaaaaaaaaaaaaggtagcagtcgacagatgaattctgcagatctgtggcttctagctgcccgggtggcatccctgtgacccctccccagtgcctctcctggccctggaagttgccactccagtgcccaccagccttgtcctaataaaattaagttgcatcattttgtctgactaggtgtccttctataatattatggggtggaggggggtggtatggagcaaggggcaagttgggaagacaacctgtagggcctgcggggtctattgggaaccaagctggagtgcagtggcacaatcttggctcactgcaatctccgcctcctgggttcaagcgattctcctgcctcagcctcccgagttgttgggattccaggcatgcatgaccaggctcagctaatttttgtttttttggtagagacggggtttcaccatattggccaggctggtctccaactcctaatctcaggtgatctacccaccttggcctcccaaattgctgggattacaggcgtgaaccactgctcccttccctgtccttctgattttaaaaaaaagagaaatgttctggcacctgcacttgcactggggacagcctattttgctagtttgttttgtttcgttttgttttgatggagagcgtatgttgtttaaacgcggccgcaggaacccctagtgatggagttggccactccctctctgcgcgctcgctcgctcactgaggccgggcgaccaaaggtcgcccgacgcccgggctttgcccgggcggcctcagtgagcgagcgagcgcgcagagagggagtggccaa

SEQ ID NO: 415 - DNA, 2085 bp, Artificial Sequence
  Description of Artificial Sequence: Synthetic polynucleotide
  I-1c.v3 (I-to-I)
ctgcgcgctcgctcgctcactgaggccgcccgggcaaagcccgggcgtcgggcgacctttggtcgcccggcctcagtgagcgagcgagcgcgcagagagggagtggcgcgccacgcgtggatctaatagtaatcaattacggggtcattagttcatagcccatatatggagttccgcgttacataacttacggtaaatggcccgcctggctgaccgcccaacgacccccgcccattgacgtcaataatgacgtatgttcccatagtaacgccaatagggactttccattgacgtcaatgggtggagtatttacggtaaactgcccacttggcagtacatcaagtgtatcatatgccaagtccgccccctattgacgtcaatgacggtaaatggcccgcctggcattatgcccagtacatgaccttacgggactttcctacttggcagtacatctacgtattagtcatcgctattaccatggtgatgcggttttggcagtacaccaatgggcgtggatagcggtttgactcacggggatttccaagtctccaccccattgacgtcaatgggagtttgttttggcaccaaaatcaacgggactttccaaaatgtcgtaataaccccgccccgttgacgcaaatgggcggtaggcgtgtacggtgggaggtctatataagcagagctcgtttagtgaaccgtcagatcactagaagctttattgcggtagtttatcacagttaaattgctaacgcagtcagtgcttctgacacaacagtctcgaacttaagctgcagaagttggtcgtgaggcactgggcaggtaagtatcaaggttacaagacaggtttaaggagaccaatagaaactgggcttgtcgagacagagaagactcttgcgtttctgataggcacctattggtcttactgacatccactttgcctttctctccacaggtgtccactcccagttcaattacagctcttaaggctagagtacttaatacgactcactataggctagcctcgacggtaccgccaccatggaacaggacaacagccccaggaagatccagttcacagtgcccctgctggaaccccacctggaccctgaggctgctgagcagatcaggaggagaaggcctgaccctgccaccctggtgctgaccagtgaccagagcagccctgagattgacgaggacaggatccccaacccccacctgaagagcaccctggcctgataattcgaactgatcacttttttaataaaaggggcatttggaaaaaaaaaaaaaaggtagcagtcgacagatgaattctgcagatctgtggcttctagctgcccgggtggcatccctgtgacccctccccagtgcctctcctggccctggaagttgccactccagtgcccaccagccttgtcctaataaaattaagttgcatcattttgtctgactaggtgtccttctataatattatggggtggaggggggtggtatggagcaaggggcaagttgggaagacaacctgtagggcctgcggggtctattgggaaccaagctggagtgcagtggcacaatcttggctcactgcaatctccgcctcctgggttcaagcgattctcctgcctcagcctcccgagttgttgggattccaggcatgcatgaccaggctcagctaatttttgtttttttggtagagacggggtttcaccatattggccaggctggtctccaactcctaatctcaggtgatctacccaccttggcctcccaaattgctgggattacaggcgtgaaccactgctcccttccctgtccttctgattttaaaaaaaagagaaatgttctggcacctgcacttgcactggggacagcctattttgctagtttgttttgtttcgttttgttttgatggagagcgtatgttgtttaaacgcggccgcaggaacccctagtgatggagttggccactccctctctgcgcgctcgctcgctcactgaggccgggcgaccaaaggtcgcccgacgcccgggctttgcccgggcggcctcagtgagcgagcgagcgcgcagagagggagtggccaa

SEQ ID NO: 416 - DNA, 2085 bp, Artificial Sequence
  Description of Artificial Sequence: Synthetic polynucleotide
  I-1c.v4(I-to-I)
ctgcgcgctcgctcgctcactgaggccgcccgggcaaagcccgggcgtcgggcgacctttggtcgcccggcctcagtgagcgagcgagcgcgcagagagggagtggcgcgccacgcgtggatctaatagtaatcaattacggggtcattagttcatagcccatatatggagttccgcgttacataacttacggtaaatggcccgcctggctgaccgcccaacgacccccgcccattgacgtcaataatgacgtatgttcccatagtaacgccaatagggactttccattgacgtcaatgggtggagtatttacggtaaactgcccacttggcagtacatcaagtgtatcatatgccaagtccgccccctattgacgtcaatgacggtaaatggcccgcctggcattatgcccagtacatgaccttacgggactttcctacttggcagtacatctacgtattagtcatcgctattaccatggtgatgcggttttggcagtacaccaatgggcgtggatagcggtttgactcacggggatttccaagtctccaccccattgacgtcaatgggagtttgttttggcaccaaaatcaacgggactttccaaaatgtcgtaataaccccgccccgttgacgcaaatgggcggtaggcgtgtacggtgggaggtctatataagcagagctcgtttagtgaaccgtcagatcactagaagctttattgcggtagtttatcacagttaaattgctaacgcagtcagtgcttctgacacaacagtctcgaacttaagctgcagaagttggtcgtgaggcactgggcaggtaagtatcaaggttacaagacaggtttaaggagaccaatagaaactgggcttgtcgagacagagaagactcttgcgtttctgataggcacctattggtcttactgacatccactttgcctttctctccacaggtgtccactcccagttcaattacagctcttaaggctagagtacttaatacgactcactataggctagcctctacggtaccgccaccatggaacaggacaacagccccagaaagatccagttcactgtgcccctgctggaaccccacctggacccagaggcagcagagcagatcagaagaagaaggccagacccagccaccctggtgctgacctctgaccagagcagcccagagattgatgaggacagaatccccaacccccacctgaagagcaccctggcctgataattcgaactgatcacttttttaataaaaggggcatttggaaaaaaaaaaaaaaggtagcagtcgacagatgaattctgcagatctgtggcttctagctgcccgggtggcatccctgtgacccctccccagtgcctctcctggccctggaagttgccactccagtgcccaccagccttgtcctaataaaattaagttgcatcattttgtctgactaggtgtccttctataatattatggggtggaggggggtggtatggagcaaggggcaagttgggaagacaacctgtagggcctgcggggtctattgggaaccaagctggagtgcagtggcacaatcttggctcactgcaatctccgcctcctgggttcaagcgattctcctgcctcagcctcccgagttgttgggattccaggcatgcatgaccaggctcagctaatttttgtttttttggtagagacggggtttcaccatattggccaggctggtctccaactcctaatctcaggtgatctacccaccttggcctcccaaattgctgggattacaggcgtgaaccactgctcccttccctgtccttctgattttaaaaaaaagagaaatgttctggcacctgcacttgcactggggacagcctattttgctagtttgttttgtttcgttttgttttgatggagagcgtatgttgtttaaacgcggccgcaggaacccctagtgatggagttggccactccctctctgcgcgctcgctcgctcactgaggccgggcgaccaaaggtcgcccgacgcccgggctttgcccgggcggcctcagtgagcgagcgagcgcgcagagagggagtggccaa

SEQ ID NO: 417 - DNA, 1658 bp, Artificial Sequence
  Description of Artificial Sequence: Synthetic polynucleotide
  I-1c.v4 (I-to-I)
ctgcgcgctcgctcgctcactgaggccgcccgggcaaagcccgggcgtcgggcgacctttggtcgcccggcctcagtgagcgagcgagcgcgcagagagggagtggcgcgccacgcgtggatctaatagtaatcaattacggggtcattagttcatagcccatatatggagttccgcgttacataacttacggtaaatggcccgcctggctgaccgcccaacgacccccgcccattgacgtcaataatgacgtatgttcccatagtaacgccaatagggactttccattgacgtcaatgggtggagtatttacggtaaactgcccacttggcagtacatcaagtgtatcatatgccaagtccgccccctattgacgtcaatgacggtaaatggcccgcctggcattatgcccagtacatgaccttacgggactttcctacttggcagtacatctacgtattagtcatcgctattaccatggtgatgcggttttggcagtacaccaatgggcgtggatagcggtttgactcacggggatttccaagtctccaccccattgacgtcaatgggagtttgttttggcaccaaaatcaacgggactttccaaaatgtcgtaataaccccgccccgttgacgcaaatgggcggtaggcgtgtacggtgggaggtctatataagcagagctcgtttagtgaaccgtcagatcactagaagctttattgcggtagtttatcacagttaaattgctaacgcagtcagtgcttctgacacaacagtctcgaacttaagctgcagaagttggtcgtgaggcactgggcaggtaagtatcaaggttacaagacaggtttaaggagaccaatagaaactgggcttgtcgagacagagaagactcttgcgtttctgataggcacctattggtcttactgacatccactttgcctttctctccacaggtgtccactcccagttcaattacagctcttaaggctagagtacttaatacgactcactataggctagcctcgacggtaccgccaccatggaacaggacaacagcccccggaagatccagttcaccgtgcccctgctggaaccccacctggaccccgaggccgccgagcagatccggcggagaaggcccgaccccgccaccctggtgctgaccagcgaccagagcagccccgagatcgacgaggaccggatccccaacccccacctgaagagcaccctggcctgatgagggccgcgactctagatcataatcagccataccacatttgtagaggttttacttgctttaaaaaacctcccacacctccccctgaacctgaaacttaaattgattgcaattgttgttgttaacttgtttattgcagcttatattggttacaaataaagcaatagcatcacaaatttcacaaataaagcatttttttcactgcattctagttgtggtttgtccaaactcttcaatgtaacttaaggcgggaattgatctgtttaaacgcggccgcaggaacccctagtgatggagttggccactccctctctgcgcgctcgctcgctcactgaggccgggcgaccaaaggtcgcccgacgcccgggctttgcccgggcggcctcagtgagcgagcgagcgcgcagagagggagtggccaa

SEQ ID NO: 418 - DNA, 1644 bp, Artificial Sequence
  Description of Artificial Sequence: Synthetic polynucleotide
  I-1c.v5 (I-to-I)
ctgcgcgctcgctcgctcactgaggccgcccgggcaaagcccgggcgtcgggcgacctttggtcgcccggcctcagtgagcgagcgagcgcgcagagagggagtggcgcgccacgcgtggatctaatagtaatcaattacggggtcattagttcatagcccatatatggagttccgcgttacataacttacggtaaatggcccgcctggctgaccgcccaacgacccccgcccattgacgtcaataatgacgtatgttcccatagtaacgccaatagggactttccattgacgtcaatgggtggagtatttacggtaaactgcccacttggcagtacatcaagtgtatcatatgccaagtccgccccctattgacgtcaatgacggtaaatggcccgcctggcattatgcccagtacatgaccttacgggactttcctacttggcagtacatctacgtattagtcatcgctattaccatggtgatgcggttttggcagtacaccaatgggcgtggatagcggtttgactcacggggatttccaagtctccaccccattgacgtcaatgggagtttgttttggcaccaaaatcaacgggactttccaaaatgtcgtaataaccccgccccgttgacgcaaatgggcggtaggcgtgtacggtgggaggtctatataagcagagctcgtttagtgaaccgtcagatcactagaagctttattgcggtagtttatcacagttaaattgctaacgcagtcagtgcttctgacacaacagtctcgaacttaagctgcagaagttggtcgtgaggcactgggcaggtaagtatcaaggttacaagacaggtttaaggagaccaatagaaactgggcttgtcgagacagagaagactcttgcgtttctgataggcacctattggtcttactgacatccactttgcctttctctccacaggtgtccactcccagttcaattacagctcttaaggctagagtacttaatacgactcactataggctagcctctacggtaccgccaccatggaacaggacaacagccccaggaagatccagttcacagtgcccctgctggaaccccacctggaccctgaggctgctgagcagatcaggaggagaaggcctgaccctgccaccctggtgctgaccagtgaccagagcagccctgagattgatgaggacaggatccccaacccccacctgaagagcaccctggcctgataattcgaactgatcacttaccacatttgtagaggttttacttgctttaaaaaacctcccacacctccccctgaacctgaaacttaaattgattgcaattgttgttgttaacttgtttattgcagcttatattggttacaaataaagcaatagcatcacaaatttcacaaataaagcatttttttcactgcattctagttgtggtttgtccaaactcttcaatgtaacttaaggcgggaattgatctgtttaaacgcggccgcaggaacccctagtgatggagttggccactccctctctgcgcgctcgctcgctcactgaggccgggcgaccaaaggtcgcccgacgcccgggctttgcccgggcggcctcagtgagcgagcgagcgcgcagagagggagtggccaa

SEQ ID NO: 419 - DNA, 1658 bp, Artificial Sequence
  Description of Artificial Sequence: Synthetic polynucleotide
  I-1c.v7 (I-to-I)
ctgcgcgctcgctcgctcactgaggccgcccgggcaaagcccgggcgtcgggcgacctttggtcgcccggcctcagtgagcgagcgagcgcgcagagagggagtggcgcgccacgcgtggatctaatagtaatcaattacggggtcattagttcatagcccatatatggagttccgcgttacataacttacggtaaatggcccgcctggctgaccgcccaacgacccccgcccattgacgtcaataatgacgtatgttcccatagtaacgccaatagggactttccattgacgtcaatgggtggagtatttacggtaaactgcccacttggcagtacatcaagtgtatcatatgccaagtccgccccctattgacgtcaatgacggtaaatggcccgcctggcattatgcccagtacatgaccttacgggactttcctacttggcagtacatctacgtattagtcatcgctattaccatggtgatgcggttttggcagtacaccaatgggcgtggatagcggtttgactcacggggatttccaagtctccaccccattgacgtcaatgggagtttgttttggcaccaaaatcaacgggactttccaaaatgtcgtaataaccccgccccgttgacgcaaatgggcggtaggcgtgtacggtgggaggtctatataagcagagctcgtttagtgaaccgtcagatcactagaagctttattgcggtagtttatcacagttaaattgctaacgcagtcagtgcttctgacacaacagtctcgaacttaagctgcagaagttggtcgtgaggcactgggcaggtaagtatcaaggttacaagacaggtttaaggagaccaatagaaactgggcttgtcgagacagagaagactcttgcgtttctgataggcacctattggtcttactgacatccactttgcctttctctccacaggtgtccactcccagttcaattacagctcttaaggctagagtacttaatacgactcactataggctagcctcgacggtaccgccaccatggaacaggacaacagcccccggaagatccagttcaccgtgcccctgctggaaccccacctggaccccgaggccgccgagcagatccggcggagaaggcccgaccccgccaccctggtgctgaccagcgaccagagcagccccgagatcgacgaggaccggatccccaacccccacctgaagagcaccctggcctgatgagggccgcgactctagatcataatcagccataccacatttgtagaggttttacttgctttaaaaaacctcccacacctccccctgaacctgaaacataaaatgaatgcaattgttgttgttaacttgtttattgcagcttataatggttacaaataaagcaatagcatcacaaatttcacaaataaagcatttttttcactgcattctagttgtggtttgtccaaactcatcaatgtatcttaaggcgggaattgatctgtttaaacgcggccgcaggaacccctagtgatggagttggccactccctctctgcgcgctcgctcgctcactgaggccgggcgaccaaaggtcgcccgacgcccgggctttgcccgggcggcctcagtgagcgagcgagcgcgcagagagggagtggccaa

SEQ ID NO: 420 - DNA, 1644 bp, Artificial Sequence
  Description of Artificial Sequence: Synthetic polynucleotide
  I-1c.v8 (I-to-I)
ctgcgcgctcgctcgctcactgaggccgcccgggcaaagcccgggcgtcgggcgacctttggtcgcccggcctcagtgagcgagcgagcgcgcagagagggagtggcgcgccacgcgtggatctaatagtaatcaattacggggtcattagttcatagcccatatatggagttccgcgttacataacttacggtaaatggcccgcctggctgaccgcccaacgacccccgcccattgacgtcaataatgacgtatgttcccatagtaacgccaatagggactttccattgacgtcaatgggtggagtatttacggtaaactgcccacttggcagtacatcaagtgtatcatatgccaagtccgccccctattgacgtcaatgacggtaaatggcccgcctggcattatgcccagtacatgaccttacgggactttcctacttggcagtacatctacgtattagtcatcgctattaccatggtgatgcggttttggcagtacaccaatgggcgtggatagcggtttgactcacggggatttccaagtctccaccccattgacgtcaatgggagtttgttttggcaccaaaatcaacgggactttccaaaatgtcgtaataaccccgccccgttgacgcaaatgggcggtaggcgtgtacggtgggaggtctatataagcagagctcgtttagtgaaccgtcagatcactagaagctttattgcggtagtttatcacagttaaattgctaacgcagtcagtgcttctgacacaacagtctcgaacttaagctgcagaagttggtcgtgaggcactgggcaggtaagtatcaaggttacaagacaggtttaaggagaccaatagaaactgggcttgtcgagacagagaagactcttgcgtttctgataggcacctattggtcttactgacatccactttgcctttctctccacaggtgtccactcccagttcaattacagctcttaaggctagagtacttaatacgactcactataggctagcctctacggtaccgccaccatggaacaggacaacagccccaggaagatccagttcacagtgcccctgctggaaccccacctggaccctgaggctgctgagcagatcaggaggagaaggcctgaccctgccaccctggtgctgaccagtgaccagagcagccctgagattgatgaggacaggatccccaacccccacctgaagagcaccctggcctgataattcgaactgatcacttaccacatttgtagaggttttacttgctttaaaaaacctcccacacctccccctgaacctgaaacataaaatgaatgcaattgttgttgttaacttgtttattgcagcttataatggttacaaataaagcaatagcatcacaaatttcacaaataaagcatttttttcactgcattctagttgtggtttgtccaaactcatcaatgtatcttaaggcgggaattgatctgtttaaacgcggccgcaggaacccctagtgatggagttggccactccctctctgcgcgctcgctcgctcactgaggccgggcgaccaaaggtcgcccgacgcccgggctttgcccgggcggcctcagtgagcgagcgagcgcgcagagagggagtggccaa

SEQ ID NO: 421 - DNA, 1644 bp, Artificial Sequence
  Description of Artificial Sequence: Synthetic polynucleotide
  I-1c.v9 (I-to-I)
ctgcgcgctcgctcgctcactgaggccgcccgggcaaagcccgggcgtcgggcgacctttggtcgcccggcctcagtgagcgagcgagcgcgcagagagggagtggcgcgccacgcgtggatctaatagtaatcaattacggggtcattagttcatagcccatatatggagttccgcgttacataacttacggtaaatggcccgcctggctgaccgcccaacgacccccgcccattgacgtcaataatgacgtatgttcccatagtaacgccaatagggactttccattgacgtcaatgggtggagtatttacggtaaactgcccacttggcagtacatcaagtgtatcatatgccaagtccgccccctattgacgtcaatgacggtaaatggcccgcctggcattatgcccagtacatgaccttacgggactttcctacttggcagtacatctacgtattagtcatcgctattaccatggtgatgcggttttggcagtacaccaatgggcgtggatagcggtttgactcacggggatttccaagtctccaccccattgacgtcaatgggagtttgttttggcaccaaaatcaacgggactttccaaaatgtcgtaataaccccgccccgttgacgcaaatgggcggtaggcgtgtacggtgggaggtctatataagcagagctcgtttagtgaaccgtcagatcactagaagctttattgcggtagtttatcacagttaaattgctaacgcagtcagtgcttctgacacaacagtctcgaacttaagctgcagaagttggtcgtgaggcactgggcaggtaagtatcaaggttacaagacaggtttaaggagaccaatagaaactgggcttgtcgagacagagaagactcttgcgtttctgataggcacctattggtcttactgacatccactttgcctttctctccacaggtgtccactcccagttcaattacagctcttaaggctagagtacttaatacgactcactataggctagcctcgacggtaccgccaccatggaacaggacaacagccccaggaagatccagttcacagtgcccctgctggaaccccacctggaccctgaggctgctgagcagatcaggaggagaaggcctgaccctgccaccctggtgctgaccagtgaccagagcagccctgagattgacgaggacaggatccccaacccccacctgaagagcaccctggcctgataattcgaactgatcacttaccacatttgtagaggttttacttgctttaaaaaacctcccacacctccccctgaacctgaaacataaaatgaatgcaattgttgttgttaacttgtttattgcagcttataatggttacaaataaagcaatagcatcacaaatttcacaaataaagcatttttttcactgcattctagttgtggtttgtccaaactcatcaatgtatcttaaggcgggaattgatctgtttaaacgcggccgcaggaacccctagtgatggagttggccactccctctctgcgcgctcgctcgctcactgaggccgggcgaccaaaggtcgcccgacgcccgggctttgcccgggcggcctcagtgagcgagcgagcgcgcagagagggagtggccaa

SEQ ID NO: 422 - DNA, 1644 bp, Artificial Sequence
  Description of Artificial Sequence: Synthetic polynucleotide
  I-1c.v10 (I-to-I)
ctgcgcgctcgctcgctcactgaggccgcccgggcaaagcccgggcgtcgggcgacctttggtcgcccggcctcagtgagcgagcgagcgcgcagagagggagtggcgcgccacgcgtggatctaatagtaatcaattacggggtcattagttcatagcccatatatggagttccgcgttacataacttacggtaaatggcccgcctggctgaccgcccaacgacccccgcccattgacgtcaataatgacgtatgttcccatagtaacgccaatagggactttccattgacgtcaatgggtggagtatttacggtaaactgcccacttggcagtacatcaagtgtatcatatgccaagtccgccccctattgacgtcaatgacggtaaatggcccgcctggcattatgcccagtacatgaccttacgggactttcctacttggcagtacatctacgtattagtcatcgctattaccatggtgatgcggttttggcagtacaccaatgggcgtggatagcggtttgactcacggggatttccaagtctccaccccattgacgtcaatgggagtttgttttggcaccaaaatcaacgggactttccaaaatgtcgtaataaccccgccccgttgacgcaaatgggcggtaggcgtgtacggtgggaggtctatataagcagagctcgtttagtgaaccgtcagatcactagaagctttattgcggtagtttatcacagttaaattgctaacgcagtcagtgcttctgacacaacagtctcgaacttaagctgcagaagttggtcgtgaggcactgggcaggtaagtatcaaggttacaagacaggtttaaggagaccaatagaaactgggcttgtcgagacagagaagactcttgcgtttctgataggcacctattggtcttactgacatccactttgcctttctctccacaggtgtccactcccagttcaattacagctcttaaggctagagtacttaatacgactcactataggctagcctctacggtaccgccaccatggaacaggacaacagccccagaaagatccagttcactgtgcccctgctggaaccccacctggacccagaggcagcagagcagatcagaagaagaaggccagacccagccaccctggtgctgacctctgaccagagcagcccagagattgatgaggacagaatccccaacccccacctgaagagcaccctggcctgataattcgaactgatcacttaccacatttgtagaggttttacttgctttaaaaaacctcccacacctccccctgaacctgaaacataaaatgaatgcaattgttgttgttaacttgtttattgcagcttataatggttacaaataaagcaatagcatcacaaatttcacaaataaagcatttttttcactgcattctagttgtggtttgtccaaactcatcaatgtatcttaaggcgggaattgatctgtttaaacgcggccgcaggaacccctagtgatggagttggccactccctctctgcgcgctcgctcgctcactgaggccgggcgaccaaaggtcgcccgacgcccgggctttgcccgggcggcctcagtgagcgagcgagcgcgcagagagggagtggccaa

SEQ ID NO: 423 - DNA, 1983 bp, Artificial Sequence
  Description of Artificial Sequence: Synthetic polynucleotide
  I-1c.v11 (I-to-I)
ctgcgcgctcgctcgctcactgaggccgcccgggcaaagcccgggcgtcgggcgacctttggtcgcccggcctcagtgagcgagcgagcgcgcagagagggagtggcgcgccacgcgtggatctaatagtaatcaattacggggtcattagttcatagcccatatatggagttccgcgttacataacttacggtaaatggcccgcctggctgaccgcccaacgacccccgcccattgacgtcaataatgacgtatgttcccatagtaacgccaatagggactttccattgacgtcaatgggtggagtatttacggtaaactgcccacttggcagtacatcaagtgtatcatatgccaagtccgccccctattgacgtcaatgacggtaaatggcccgcctggcattatgcccagtacatgaccttacgggactttcctacttggcagtacatctacgtattagtcatcgctattaccatggtgatgcggttttggcagtacaccaatgggcgtggatagcggtttgactcacggggatttccaagtctccaccccattgacgtcaatgggagtttgttttggcaccaaaatcaacgggactttccaaaatgtcgtaataaccccgccccgttgacgcaaatgggcggtaggcgtgtacggtgggaggtctatataagcagagctcgtttagtgaaccgtcagatcactagtgcttctgacacaacagtctcgaacttaagctgcagaagttggtcgtgaggcactgggcaggtaagtatcaaggttacaagacaggtttaaggagaccaatagaaactgggcttgtcgagacagagaagactcttgcgtttctgataggcacctattggtcttactgacatccactttgcctttctctccacaggtgtccactcccagttcaatagtactgccaccatggagcaggacaacagccccagaaagatccagttcactgtgcccctgctggagccccacctggaccctgaggcagcagagcagatcagaagaagaagacctgaccctgccaccctggtgctgacctctgaccagagcagccctgagattgacgaggacagaatccccaacccccacctgaagagcaccctggcctgataattcgaactgatcacttttttaataaaaggggcatttggaaaaaaaaaaaaaaggtagcagtcgacagatgaattctgcagatctgtggcttctagctgcccgggtggcatccctgtgacccctccccagtgcctctcctggccctggaagttgccactccagtgcccaccagccttgtcctaataaaattaagttgcatcattttgtctgactaggtgtccttctataatattatggggtggaggggggtggtatggagcaaggggcaagttgggaagacaacctgtagggcctgcggggtctattgggaaccaagctggagtgcagtggcacaatcttggctcactgcaatctccgcctcctgggttcaagcgattctcctgcctcagcctcccgagttgttgggattccaggcatgcatgaccaggctcagctaatttttgtttttttggtagagacggggtttcaccatattggccaggctggtctccaactcctaatctcaggtgatctacccaccttggcctcccaaattgctgggattacaggcgtgaaccactgctcccttccctgtccttctgattttaaaaaaaagagaaatgttctggcacctgcacttgcactggggacagcctattttgctagtttgttttgtttcgttttgttttgatggagagcgtatgttgtttaaacgcggccgcaggaacccctagtgatggagttggccactccctctctgcgcgctcgctcgctcactgaggccgggcgaccaaaggtcgcccgacgcccgggctttgcccgggcggcctcagtgagcgagcgagcgcgcagagagggagtggccaa

SEQ ID NO: 424 - DNA, 1983 bp, Artificial Sequence
  Description of Artificial Sequence: Synthetic polynucleotide
  I-1c.v12 (I-to-I)
ctgcgcgctcgctcgctcactgaggccgcccgggcaaagcccgggcgtcgggcgacctttggtcgcccggcctcagtgagcgagcgagcgcgcagagagggagtggcgcgccacgcgtggatctaatagtaatcaattacggggtcattagttcatagcccatatatggagttccgcgttacataacttacggtaaatggcccgcctggctgaccgcccaacgacccccgcccattgacgtcaataatgacgtatgttcccatagtaacgccaatagggactttccattgacgtcaatgggtggagtatttacggtaaactgcccacttggcagtacatcaagtgtatcatatgccaagtccgccccctattgacgtcaatgacggtaaatggcccgcctggcattatgcccagtacatgaccttacgggactttcctacttggcagtacatctacgtattagtcatcgctattaccatggtgatgcggttttggcagtacaccaatgggcgtggatagcggtttgactcacggggatttccaagtctccaccccattgacgtcaatgggagtttgttttggcaccaaaatcaacgggactttccaaaatgtcgtaataaccccgccccgttgacgcaaatgggcggtaggcgtgtacggtgggaggtctatataagcagagctcgtttagtgaaccgtcagatcactagtgcttctgacacaacagtctcgaacttaagctgcagaagttggtcgtgaggcactgggcaggtaagtatcaaggttacaagacaggtttaaggagaccaatagaaactgggcttgtcgagacagagaagactcttgcgtttctgataggcacctattggtcttactgacatccactttgcctttctctccacaggtgtccactcccagttcaatagtactgccaccatggaacaagacaactcccccagaaagatacagttcactgtgcccctgctggagcctcacctggaccctgaggcagcagagcagatcagaagaaggagaccagaccctgccaccctggtgctcacttctgaccagagcagtcctgaaattgacgaagacagaattcctaacccccacctaaagtccaccctggcctgataattcgaactgatcacttttttaataaaaggggcatttggaaaaaaaaaaaaaaggtagcagtcgacagatgaattctgcagatctgtggcttctagctgcccgggtggcatccctgtgacccctccccagtgcctctcctggccctggaagttgccactccagtgcccaccagccttgtcctaataaaattaagttgcatcattttgtctgactaggtgtccttctataatattatggggtggaggggggtggtatggagcaaggggcaagttgggaagacaacctgtagggcctgcggggtctattgggaaccaagctggagtgcagtggcacaatcttggctcactgcaatctccgcctcctgggttcaagcgattctcctgcctcagcctcccgagttgttgggattccaggcatgcatgaccaggctcagctaatttttgtttttttggtagagacggggtttcaccatattggccaggctggtctccaactcctaatctcaggtgatctacccaccttggcctcccaaattgctgggattacaggcgtgaaccactgctcccttccctgtccttctgattttaaaaaaaagagaaatgttctggcacctgcacttgcactggggacagcctattttgctagtttgttttgtttcgttttgttttgatggagagcgtatgttgtttaaacgcggccgcaggaacccctagtgatggagttggccactccctctctgcgcgctcgctcgctcactgaggccgggcgaccaaaggtcgcccgacgcccgggctttgcccgggcggcctcagtgagcgagcgagcgcgcagagagggagtggccaa

SEQ ID NO: 425 - DNA, 1983 bp, Artificial Sequence
  Description of Artificial Sequence: Synthetic polynucleotide
  I-1c.v13 (I-to-I)
ctgcgcgctcgctcgctcactgaggccgcccgggcaaagcccgggcgtcgggcgacctttggtcgcccggcctcagtgagcgagcgagcgcgcagagagggagtggcgcgccacgcgtggatctaatagtaatcaattacggggtcattagttcatagcccatatatggagttccgcgttacataacttacggtaaatggcccgcctggctgaccgcccaacgacccccgcccattgacgtcaataatgacgtatgttcccatagtaacgccaatagggactttccattgacgtcaatgggtggagtatttacggtaaactgcccacttggcagtacatcaagtgtatcatatgccaagtccgccccctattgacgtcaatgacggtaaatggcccgcctggcattatgcccagtacatgaccttacgggactttcctacttggcagtacatctacgtattagtcatcgctattaccatggtgatgcggttttggcagtacaccaatgggcgtggatagcggtttgactcacggggatttccaagtctccaccccattgacgtcaatgggagtttgttttggcaccaaaatcaacgggactttccaaaatgtcgtaataaccccgccccgttgacgcaaatgggcggtaggcgtgtacggtgggaggtctatataagcagagctcgtttagtgaaccgtcagatcactagtgcttctgacacaacagtctcgaacttaagctgcagaagttggtcgtgaggcactgggcaggtaagtatcaaggttacaagacaggtttaaggagaccaatagaaactgggcttgtcgagacagagaagactcttgcgtttctgataggcacctattggtcttactgacatccactttgcctttctctccacaggtgtccactcccagttcaatagtactgccaccatggagcaggacaacagcccaaggaagatccagttcactgtgccactgctggagccacacctggacccagaggcagcagagcagatcagaagaagaagaccagacccagccaccctggtgctgacctctgaccagagcagcccagagattgacgaggacagaatcccaaacccacacctgaagagcaccctggcctgataattcgaactgatcacttttttaataaaaggggcatttggaaaaaaaaaaaaaaggtagcagtcgacagatgaattctgcagatctgtggcttctagctgcccgggtggcatccctgtgacccctccccagtgcctctcctggccctggaagttgccactccagtgcccaccagccttgtcctaataaaattaagttgcatcattttgtctgactaggtgtccttctataatattatggggtggaggggggtggtatggagcaaggggcaagttgggaagacaacctgtagggcctgcggggtctattgggaaccaagctggagtgcagtggcacaatcttggctcactgcaatctccgcctcctgggttcaagcgattctcctgcctcagcctcccgagttgttgggattccaggcatgcatgaccaggctcagctaatttttgtttttttggtagagacggggtttcaccatattggccaggctggtctccaactcctaatctcaggtgatctacccaccttggcctcccaaattgctgggattacaggcgtgaaccactgctcccttccctgtccttctgattttaaaaaaaagagaaatgttctggcacctgcacttgcactggggacagcctattttgctagtttgttttgtttcgttttgttttgatggagagcgtatgttgtttaaacgcggccgcaggaacccctagtgatggagttggccactccctctctgcgcgctcgctcgctcactgaggccgggcgaccaaaggtcgcccgacgcccgggctttgcccgggcggcctcagtgagcgagcgagcgcgcagagagggagtggccaa

SEQ ID NO: 426 - DNA, 1983 bp, Artificial Sequence
  Description of Artificial Sequence: Synthetic polynucleotide
  I-1c.v14 (I-to-I)
ctgcgcgctcgctcgctcactgaggccgcccgggcaaagcccgggcgtcgggcgacctttggtcgcccggcctcagtgagcgagcgagcgcgcagagagggagtggcgcgccacgcgtggatctaatagtaatcaattacggggtcattagttcatagcccatatatggagttccgcgttacataacttacggtaaatggcccgcctggctgaccgcccaacgacccccgcccattgacgtcaataatgacgtatgttcccatagtaacgccaatagggactttccattgacgtcaatgggtggagtatttacggtaaactgcccacttggcagtacatcaagtgtatcatatgccaagtccgccccctattgacgtcaatgacggtaaatggcccgcctggcattatgcccagtacatgaccttacgggactttcctacttggcagtacatctacgtattagtcatcgctattaccatggtgatgcggttttggcagtacaccaatgggcgtggatagcggtttgactcacggggatttccaagtctccaccccattgacgtcaatgggagtttgttttggcaccaaaatcaacgggactttccaaaatgtcgtaataaccccgccccgttgacgcaaatgggcggtaggcgtgtacggtgggaggtctatataagcagagctcgtttagtgaaccgtcagatcactagtgcttctgacacaacagtctcgaacttaagctgcagaagttggtcgtgaggcactgggcaggtaagtatcaaggttacaagacaggtttaaggagaccaatagaaactgggcttgtcgagacagagaagactcttgcgtttctgataggcacctattggtcttactgacatccactttgcctttctctccacaggtgtccactcccagttcaatagtactgccaccatggagcaggataactccccaaggaagatccagtttactgtgccactgctggaaccccacctggacccagaagctgcagagcagatcagaagaaggaggccagacccagccaccctggtgctgacttctgatcagtcaagtccagagattgacgaggataggattccaaatccccacctgaagtccaccctggcctgataattcgaactgatcacttttttaataaaaggggcatttggaaaaaaaaaaaaaaggtagcagtcgacagatgaattctgcagatctgtggcttctagctgcccgggtggcatccctgtgacccctccccagtgcctctcctggccctggaagttgccactccagtgcccaccagccttgtcctaataaaattaagttgcatcattttgtctgactaggtgtccttctataatattatggggtggaggggggtggtatggagcaaggggcaagttgggaagacaacctgtagggcctgcggggtctattgggaaccaagctggagtgcagtggcacaatcttggctcactgcaatctccgcctcctgggttcaagcgattctcctgcctcagcctcccgagttgttgggattccaggcatgcatgaccaggctcagctaatttttgtttttttggtagagacggggtttcaccatattggccaggctggtctccaactcctaatctcaggtgatctacccaccttggcctcccaaattgctgggattacaggcgtgaaccactgctcccttccctgtccttctgattttaaaaaaaagagaaatgttctggcacctgcacttgcactggggacagcctattttgctagtttgttttgtttcgttttgttttgatggagagcgtatgttgtttaaacgcggccgcaggaacccctagtgatggagttggccactccctctctgcgcgctcgctcgctcactgaggccgggcgaccaaaggtcgcccgacgcccgggctttgcccgggcggcctcagtgagcgagcgagcgcgcagagagggagtggccaa

SEQ ID NO: 427 - DNA, 1983 bp, Artificial Sequence
  Description of Artificial Sequence: Synthetic polynucleotide
  I-1c.v15 (I-to-I)
ctgcgcgctcgctcgctcactgaggccgcccgggcaaagcccgggcgtcgggcgacctttggtcgcccggcctcagtgagcgagcgagcgcgcagagagggagtggcgcgccacgcgtggatctaatagtaatcaattacggggtcattagttcatagcccatatatggagttccgcgttacataacttacggtaaatggcccgcctggctgaccgcccaacgacccccgcccattgacgtcaataatgacgtatgttcccatagtaacgccaatagggactttccattgacgtcaatgggtggagtatttacggtaaactgcccacttggcagtacatcaagtgtatcatatgccaagtccgccccctattgacgtcaatgacggtaaatggcccgcctggcattatgcccagtacatgaccttacgggactttcctacttggcagtacatctacgtattagtcatcgctattaccatggtgatgcggttttggcagtacaccaatgggcgtggatagcggtttgactcacggggatttccaagtctccaccccattgacgtcaatgggagtttgttttggcaccaaaatcaacgggactttccaaaatgtcgtaataaccccgccccgttgacgcaaatgggcggtaggcgtgtacggtgggaggtctatataagcagagctcgtttagtgaaccgtcagatcactagtgcttctgacacaacagtctcgaacttaagctgcagaagttggtcgtgaggcactgggcaggtaagtatcaaggttacaagacaggtttaaggagaccaatagaaactgggcttgtcgagacagagaagactcttgcgtttctgataggcacctattggtcttactgacatccactttgcctttctctccacaggtgtccactcccagttcaatagtactgccaccatggagcaggataattctcctagaaagattcagtttacagtgcctttgttggagcctcacttagatcctgaggctgctgagcagattagaagaagaagacctgatcctgctacattggtgttgacatctgatcagtcttctcctgagattgacgaggatagaattcctaatcctcacttgaagtctacattggcttgataattcgaactgatcacttttttaataaaaggggcatttggaaaaaaaaaaaaaaggtagcagtcgacagatgaattctgcagatctgtggcttctagctgcccgggtggcatccctgtgacccctccccagtgcctctcctggccctggaagttgccactccagtgcccaccagccttgtcctaataaaattaagttgcatcattttgtctgactaggtgtccttctataatattatggggtggaggggggtggtatggagcaaggggcaagttgggaagacaacctgtagggcctgcggggtctattgggaaccaagctggagtgcagtggcacaatcttggctcactgcaatctccgcctcctgggttcaagcgattctcctgcctcagcctcccgagttgttgggattccaggcatgcatgaccaggctcagctaatttttgtttttttggtagagacggggtttcaccatattggccaggctggtctccaactcctaatctcaggtgatctacccaccttggcctcccaaattgctgggattacaggcgtgaaccactgctcccttccctgtccttctgattttaaaaaaaagagaaatgttctggcacctgcacttgcactggggacagcctattttgctagtttgttttgtttcgttttgttttgatggagagcgtatgttgtttaaacgcggccgcaggaacccctagtgatggagttggccactccctctctgcgcgctcgctcgctcactgaggccgggcgaccaaaggtcgcccgacgcccgggctttgcccgggcggcctcagtgagcgagcgagcgcgcagagagggagtggccaa

SEQ ID NO: 428 - DNA, 1983 bp, Artificial Sequence
  Description of Artificial Sequence: Synthetic polynucleotide
  I-1c.v16 (I-to-I)
ctgcgcgctcgctcgctcactgaggccgcccgggcaaagcccgggcgtcgggcgacctttggtcgcccggcctcagtgagcgagcgagcgcgcagagagggagtggcgcgccacgcgtggatctaatagtaatcaattacggggtcattagttcatagcccatatatggagttccgcgttacataacttacggtaaatggcccgcctggctgaccgcccaacgacccccgcccattgacgtcaataatgacgtatgttcccatagtaacgccaatagggactttccattgacgtcaatgggtggagtatttacggtaaactgcccacttggcagtacatcaagtgtatcatatgccaagtccgccccctattgacgtcaatgacggtaaatggcccgcctggcattatgcccagtacatgaccttacgggactttcctacttggcagtacatctacgtattagtcatcgctattaccatggtgatgcggttttggcagtacaccaatgggcgtggatagcggtttgactcacggggatttccaagtctccaccccattgacgtcaatgggagtttgttttggcaccaaaatcaacgggactttccaaaatgtcgtaataaccccgccccgttgacgcaaatgggcggtaggcgtgtacggtgggaggtctatataagcagagctcgtttagtgaaccgtcagatcactagtgcttctgacacaacagtctcgaacttaagctgcagaagttggtcgtgaggcactgggcaggtaagtatcaaggttacaagacaggtttaaggagaccaatagaaactgggcttgtcgagacagagaagactcttgcgtttctgataggcacctattggtcttactgacatccactttgcctttctctccacaggtgtccactcccagttcaatagtactgccaccatggagcaggataattcacctagaaagattcaatttactgtacctttgcttgagcctcacctagatcctgaagcagctgaacaaattaggaggagaaggccagatcctgctacactggttttaacatctgatcagtctagtccagaaattgacgaggatagaatacctaatcctcacttgaaatctacattggcctgataattcgaactgatcacttttttaataaaaggggcatttggaaaaaaaaaaaaaaggtagcagtcgacagatgaattctgcagatctgtggcttctagctgcccgggtggcatccctgtgacccctccccagtgcctctcctggccctggaagttgccactccagtgcccaccagccttgtcctaataaaattaagttgcatcattttgtctgactaggtgtccttctataatattatggggtggaggggggtggtatggagcaaggggcaagttgggaagacaacctgtagggcctgcggggtctattgggaaccaagctggagtgcagtggcacaatcttggctcactgcaatctccgcctcctgggttcaagcgattctcctgcctcagcctcccgagttgttgggattccaggcatgcatgaccaggctcagctaatttttgtttttttggtagagacggggtttcaccatattggccaggctggtctccaactcctaatctcaggtgatctacccaccttggcctcccaaattgctgggattacaggcgtgaaccactgctcccttccctgtccttctgattttaaaaaaaagagaaatgttctggcacctgcacttgcactggggacagcctattttgctagtttgttttgtttcgttttgttttgatggagagcgtatgttgtttaaacgcggccgcaggaacccctagtgatggagttggccactccctctctgcgcgctcgctcgctcactgaggccgggcgaccaaaggtcgcccgacgcccgggctttgcccgggcggcctcagtgagcgagcgagcgcgcagagagggagtggccaa

SEQ ID NO: 429 - DNA, 1983 bp, Artificial Sequence
  Description of Artificial Sequence: Synthetic polynucleotide
  I-1c.v17 (I-to-I)
ctgcgcgctcgctcgctcactgaggccgcccgggcaaagcccgggcgtcgggcgacctttggtcgcccggcctcagtgagcgagcgagcgcgcagagagggagtggcgcgccacgcgtggatctaatagtaatcaattacggggtcattagttcatagcccatatatggagttccgcgttacataacttacggtaaatggcccgcctggctgaccgcccaacgacccccgcccattgacgtcaataatgacgtatgttcccatagtaacgccaatagggactttccattgacgtcaatgggtggagtatttacggtaaactgcccacttggcagtacatcaagtgtatcatatgccaagtccgccccctattgacgtcaatgacggtaaatggcccgcctggcattatgcccagtacatgaccttacgggactttcctacttggcagtacatctacgtattagtcatcgctattaccatggtgatgcggttttggcagtacaccaatgggcgtggatagcggtttgactcacggggatttccaagtctccaccccattgacgtcaatgggagtttgttttggcaccaaaatcaacgggactttccaaaatgtcgtaataaccccgccccgttgacgcaaatgggcggtaggcgtgtacggtgggaggtctatataagcagagctcgtttagtgaaccgtcagatcactagtgcttctgacacaacagtctcgaacttaagctgcagaagttggtcgtgaggcactgggcaggtaagtatcaaggttacaagacaggtttaaggagaccaatagaaactgggcttgtcgagacagagaagactcttgcgtttctgataggcacctattggtcttactgacatccactttgcctttctctccacaggtgtccactcccagttcaatagtactgccaccatggaacaagataatagtccaaggaaaattcaatttactgttccactgctggaaccacaccttgatccagaagcagcagaacaaattaggaggaggaggccagatccagcaactctggttctgactagtgatcaaagtagtccagaaattgacgaagataggattccaaatccacacctgaaaagcactctggcctgataattcgaactgatcacttttttaataaaaggggcatttggaaaaaaaaaaaaaaggtagcagtcgacagatgaattctgcagatctgtggcttctagctgcccgggtggcatccctgtgacccctccccagtgcctctcctggccctggaagttgccactccagtgcccaccagccttgtcctaataaaattaagttgcatcattttgtctgactaggtgtccttctataatattatggggtggaggggggtggtatggagcaaggggcaagttgggaagacaacctgtagggcctgcggggtctattgggaaccaagctggagtgcagtggcacaatcttggctcactgcaatctccgcctcctgggttcaagcgattctcctgcctcagcctcccgagttgttgggattccaggcatgcatgaccaggctcagctaatttttgtttttttggtagagacggggtttcaccatattggccaggctggtctccaactcctaatctcaggtgatctacccaccttggcctcccaaattgctgggattacaggcgtgaaccactgctcccttccctgtccttctgattttaaaaaaaagagaaatgttctggcacctgcacttgcactggggacagcctattttgctagtttgttttgtttcgttttgttttgatggagagcgtatgttgtttaaacgcggccgcaggaacccctagtgatggagttggccactccctctctgcgcgctcgctcgctcactgaggccgggcgaccaaaggtcgcccgacgcccgggctttgcccgggcggcctcagtgagcgagcgagcgcgcagagagggagtggccaa

SEQ ID NO: 430 - DNA, 1983 bp, Artificial Sequence
  Description of Artificial Sequence: Synthetic polynucleotide
  I-1c.v18 (I-to-I)
ctgcgcgctcgctcgctcactgaggccgcccgggcaaagcccgggcgtcgggcgacctttggtcgcccggcctcagtgagcgagcgagcgcgcagagagggagtggcgcgccacgcgtggatctaatagtaatcaattacggggtcattagttcatagcccatatatggagttccgcgttacataacttacggtaaatggcccgcctggctgaccgcccaacgacccccgcccattgacgtcaataatgacgtatgttcccatagtaacgccaatagggactttccattgacgtcaatgggtggagtatttacggtaaactgcccacttggcagtacatcaagtgtatcatatgccaagtccgccccctattgacgtcaatgacggtaaatggcccgcctggcattatgcccagtacatgaccttacgggactttcctacttggcagtacatctacgtattagtcatcgctattaccatggtgatgcggttttggcagtacaccaatgggcgtggatagcggtttgactcacggggatttccaagtctccaccccattgacgtcaatgggagtttgttttggcaccaaaatcaacgggactttccaaaatgtcgtaataaccccgccccgttgacgcaaatgggcggtaggcgtgtacggtgggaggtctatataagcagagctcgtttagtgaaccgtcagatcactagtgcttctgacacaacagtctcgaacttaagctgcagaagttggtcgtgaggcactgggcaggtaagtatcaaggttacaagacaggtttaaggagaccaatagaaactgggcttgtcgagacagagaagactcttgcgtttctgataggcacctattggtcttactgacatccactttgcctttctctccacaggtgtccactcccagttcaatagtactgccaccatggagcaagataattctccaagaaagatacagtttactgttcctctacttgaacctcatcttgatccagaagcagctgaacaaattaggagaaggaggccagatcctgctactttagtgctgacatcagatcaaagtagtccagaaattgacgaggataggatacctaatccacacctaaaatcaactttagcctgataattcgaactgatcacttttttaataaaaggggcatttggaaaaaaaaaaaaaaggtagcagtcgacagatgaattctgcagatctgtggcttctagctgcccgggtggcatccctgtgacccctccccagtgcctctcctggccctggaagttgccactccagtgcccaccagccttgtcctaataaaattaagttgcatcattttgtctgactaggtgtccttctataatattatggggtggaggggggtggtatggagcaaggggcaagttgggaagacaacctgtagggcctgcggggtctattgggaaccaagctggagtgcagtggcacaatcttggctcactgcaatctccgcctcctgggttcaagcgattctcctgcctcagcctcccgagttgttgggattccaggcatgcatgaccaggctcagctaatttttgtttttttggtagagacggggtttcaccatattggccaggctggtctccaactcctaatctcaggtgatctacccaccttggcctcccaaattgctgggattacaggcgtgaaccactgctcccttccctgtccttctgattttaaaaaaaagagaaatgttctggcacctgcacttgcactggggacagcctattttgctagtttgttttgtttcgttttgttttgatggagagcgtatgttgtttaaacgcggccgcaggaacccctagtgatggagttggccactccctctctgcgcgctcgctcgctcactgaggccgggcgaccaaaggtcgcccgacgcccgggctttgcccgggcggcctcagtgagcgagcgagcgcgcagagagggagtggccaa

SEQ ID NO: 431 - DNA, 1983 bp, Artificial Sequence
  Description of Artificial Sequence: Synthetic polynucleotide
  I-1c.v19 (I-to-I)
ctgcgcgctcgctcgctcactgaggccgcccgggcaaagcccgggcgtcgggcgacctttggtcgcccggcctcagtgagcgagcgagcgcgcagagagggagtggcgcgccacgcgtggatctaatagtaatcaattacggggtcattagttcatagcccatatatggagttccgcgttacataacttacggtaaatggcccgcctggctgaccgcccaacgacccccgcccattgacgtcaataatgacgtatgttcccatagtaacgccaatagggactttccattgacgtcaatgggtggagtatttacggtaaactgcccacttggcagtacatcaagtgtatcatatgccaagtccgccccctattgacgtcaatgacggtaaatggcccgcctggcattatgcccagtacatgaccttacgggactttcctacttggcagtacatctacgtattagtcatcgctattaccatggtgatgcggttttggcagtacaccaatgggcgtggatagcggtttgactcacggggatttccaagtctccaccccattgacgtcaatgggagtttgttttggcaccaaaatcaacgggactttccaaaatgtcgtaataaccccgccccgttgacgcaaatgggcggtaggcgtgtacggtgggaggtctatataagcagagctcgtttagtgaaccgtcagatcactagtgcttctgacacaacagtctcgaacttaagctgcagaagttggtcgtgaggcactgggcaggtaagtatcaaggttacaagacaggtttaaggagaccaatagaaactgggcttgtcgagacagagaagactcttgcgtttctgataggcacctattggtcttactgacatccactttgcctttctctccacaggtgtccactcccagttcaatagtactgccaccatggagcaggacaacagccccaggaagatccagttcactgtgcccctgctggagccccacctggaccctgaggcagcagagcagatcaggaggaggaggcctgaccctgccaccctggtgctgacctctgaccagagcagccctgagattgacgaggacaggattcccaacccccacctgaagagcaccctggcctgataattcgaactgatcacttttttaataaaaggggcatttggaaaaaaaaaaaaaaggtagcagtcgacagatgaattctgcagatctgtggcttctagctgcccgggtggcatccctgtgacccctccccagtgcctctcctggccctggaagttgccactccagtgcccaccagccttgtcctaataaaattaagttgcatcattttgtctgactaggtgtccttctataatattatggggtggaggggggtggtatggagcaaggggcaagttgggaagacaacctgtagggcctgcggggtctattgggaaccaagctggagtgcagtggcacaatcttggctcactgcaatctccgcctcctgggttcaagcgattctcctgcctcagcctcccgagttgttgggattccaggcatgcatgaccaggctcagctaatttttgtttttttggtagagacggggtttcaccatattggccaggctggtctccaactcctaatctcaggtgatctacccaccttggcctcccaaattgctgggattacaggcgtgaaccactgctcccttccctgtccttctgattttaaaaaaaagagaaatgttctggcacctgcacttgcactggggacagcctattttgctagtttgttttgtttcgttttgttttgatggagagcgtatgttgtttaaacgcggccgcaggaacccctagtgatggagttggccactccctctctgcgcgctcgctcgctcactgaggccgggcgaccaaaggtcgcccgacgcccgggctttgcccgggcggcctcagtgagcgagcgagcgcgcagagagggagtggccaa

SEQ ID NO: 432 - DNA, 1983 bp, Artificial Sequence
  Description of Artificial Sequence: Synthetic polynucleotide
  I-1c.v20 (I-to-I)
ctgcgcgctcgctcgctcactgaggccgcccgggcaaagcccgggcgtcgggcgacctttggtcgcccggcctcagtgagcgagcgagcgcgcagagagggagtggcgcgccacgcgtggatctaatagtaatcaattacggggtcattagttcatagcccatatatggagttccgcgttacataacttacggtaaatggcccgcctggctgaccgcccaacgacccccgcccattgacgtcaataatgacgtatgttcccatagtaacgccaatagggactttccattgacgtcaatgggtggagtatttacggtaaactgcccacttggcagtacatcaagtgtatcatatgccaagtccgccccctattgacgtcaatgacggtaaatggcccgcctggcattatgcccagtacatgaccttacgggactttcctacttggcagtacatctacgtattagtcatcgctattaccatggtgatgcggttttggcagtacaccaatgggcgtggatagcggtttgactcacggggatttccaagtctccaccccattgacgtcaatgggagtttgttttggcaccaaaatcaacgggactttccaaaatgtcgtaataaccccgccccgttgacgcaaatgggcggtaggcgtgtacggtgggaggtctatataagcagagctcgtttagtgaaccgtcagatcactagtgcttctgacacaacagtctcgaacttaagctgcagaagttggtcgtgaggcactgggcaggtaagtatcaaggttacaagacaggtttaaggagaccaatagaaactgggcttgtcgagacagagaagactcttgcgtttctgataggcacctattggtcttactgacatccactttgcctttctctccacaggtgtccactcccagttcaatagtactgccaccatggaacaggataacagtccaaggaaaattcagttcactgttccacttttagagcctcatttagaccctgaagctgcagaacagataagaagaagaagacctgaccctgctacacttgtgcttacaagtgatcagtctagcccagagatagacgaggatagaattcctaatccacacctcaaatcaaccctggcgtgataattcgaactgatcacttttttaataaaaggggcatttggaaaaaaaaaaaaaaggtagcagtcgacagatgaattctgcagatctgtggcttctagctgcccgggtggcatccctgtgacccctccccagtgcctctcctggccctggaagttgccactccagtgcccaccagccttgtcctaataaaattaagttgcatcattttgtctgactaggtgtccttctataatattatggggtggaggggggtggtatggagcaaggggcaagttgggaagacaacctgtagggcctgcggggtctattgggaaccaagctggagtgcagtggcacaatcttggctcactgcaatctccgcctcctgggttcaagcgattctcctgcctcagcctcccgagttgttgggattccaggcatgcatgaccaggctcagctaatttttgtttttttggtagagacggggtttcaccatattggccaggctggtctccaactcctaatctcaggtgatctacccaccttggcctcccaaattgctgggattacaggcgtgaaccactgctcccttccctgtccttctgattttaaaaaaaagagaaatgttctggcacctgcacttgcactggggacagcctattttgctagtttgttttgtttcgttttgttttgatggagagcgtatgttgtttaaacgcggccgcaggaacccctagtgatggagttggccactccctctctgcgcgctcgctcgctcactgaggccgggcgaccaaaggtcgcccgacgcccgggctttgcccgggcggcctcagtgagcgagcgagcgcgcagagagggagtggccaa

SEQ ID NO: 433 - DNA, 1983 bp, Artificial Sequence
  Description of Artificial Sequence: Synthetic polynucleotide
  I-1c.v21 (I-to-I)
ctgcgcgctcgctcgctcactgaggccgcccgggcaaagcccgggcgtcgggcgacctttggtcgcccggcctcagtgagcgagcgagcgcgcagagagggagtggcgcgccacgcgtggatctaatagtaatcaattacggggtcattagttcatagcccatatatggagttccgcgttacataacttacggtaaatggcccgcctggctgaccgcccaacgacccccgcccattgacgtcaataatgacgtatgttcccatagtaacgccaatagggactttccattgacgtcaatgggtggagtatttacggtaaactgcccacttggcagtacatcaagtgtatcatatgccaagtccgccccctattgacgtcaatgacggtaaatggcccgcctggcattatgcccagtacatgaccttacgggactttcctacttggcagtacatctacgtattagtcatcgctattaccatggtgatgcggttttggcagtacaccaatgggcgtggatagcggtttgactcacggggatttccaagtctccaccccattgacgtcaatgggagtttgttttggcaccaaaatcaacgggactttccaaaatgtcgtaataaccccgccccgttgacgcaaatgggcggtaggcgtgtacggtgggaggtctatataagcagagctcgtttagtgaaccgtcagatcactagtgcttctgacacaacagtctcgaacttaagctgcagaagttggtcgtgaggcactgggcaggtaagtatcaaggttacaagacaggtttaaggagaccaatagaaactgggcttgtcgagacagagaagactcttgcgtttctgataggcacctattggtcttactgacatccactttgcctttctctccacaggtgtccactcccagttcaatagtactgccaccatggagcaagacaacagccccagaaagatccagttcactgtcccactgctggagccacaccttgacccagaggcagcagagcagattagaaggagaagacccgaccctgccacccttgtgctgaccagtgaccagtcttccccagagatagacgaagacagaatccccaacccacacctcaagtccactttggcgtgataattcgaactgatcacttttttaataaaaggggcatttggaaaaaaaaaaaaaaggtagcagtcgacagatgaattctgcagatctgtggcttctagctgcccgggtggcatccctgtgacccctccccagtgcctctcctggccctggaagttgccactccagtgcccaccagccttgtcctaataaaattaagttgcatcattttgtctgactaggtgtccttctataatattatggggtggaggggggtggtatggagcaaggggcaagttgggaagacaacctgtagggcctgcggggtctattgggaaccaagctggagtgcagtggcacaatcttggctcactgcaatctccgcctcctgggttcaagcgattctcctgcctcagcctcccgagttgttgggattccaggcatgcatgaccaggctcagctaatttttgtttttttggtagagacggggtttcaccatattggccaggctggtctccaactcctaatctcaggtgatctacccaccttggcctcccaaattgctgggattacaggcgtgaaccactgctcccttccctgtccttctgattttaaaaaaaagagaaatgttctggcacctgcacttgcactggggacagcctattttgctagtttgttttgtttcgttttgttttgatggagagcgtatgttgtttaaacgcggccgcaggaacccctagtgatggagttggccactccctctctgcgcgctcgctcgctcactgaggccgggcgaccaaaggtcgcccgacgcccgggctttgcccgggcggcctcagtgagcgagcgagcgcgcagagagggagtggccaa

SEQ ID NO: 434 - DNA, 1983 bp, Artificial Sequence
  Description of Artificial Sequence: Synthetic polynucleotide
  I-1c.v22 (I-to-I)
ctgcgcgctcgctcgctcactgaggccgcccgggcaaagcccgggcgtcgggcgacctttggtcgcccggcctcagtgagcgagcgagcgcgcagagagggagtggcgcgccacgcgtggatctaatagtaatcaattacggggtcattagttcatagcccatatatggagttccgcgttacataacttacggtaaatggcccgcctggctgaccgcccaacgacccccgcccattgacgtcaataatgacgtatgttcccatagtaacgccaatagggactttccattgacgtcaatgggtggagtatttacggtaaactgcccacttggcagtacatcaagtgtatcatatgccaagtccgccccctattgacgtcaatgacggtaaatggcccgcctggcattatgcccagtacatgaccttacgggactttcctacttggcagtacatctacgtattagtcatcgctattaccatggtgatgcggttttggcagtacaccaatgggcgtggatagcggtttgactcacggggatttccaagtctccaccccattgacgtcaatgggagtttgttttggcaccaaaatcaacgggactttccaaaatgtcgtaataaccccgccccgttgacgcaaatgggcggtaggcgtgtacggtgggaggtctatataagcagagctcgtttagtgaaccgtcagatcactagtgcttctgacacaacagtctcgaacttaagctgcagaagttggtcgtgaggcactgggcaggtaagtatcaaggttacaagacaggtttaaggagaccaatagaaactgggcttgtcgagacagagaagactcttgcgtttctgataggcacctattggtcttactgacatccactttgcctttctctccacaggtgtccactcccagttcaatagtactgccaccatggagcaagacaacagcccccgaaagatccagttcacggtcccgctgctggagccgcaccttgaccccgaggcggcggagcagattcggaggcgccgccccgaccctgccaccctcgtgctgaccagtgaccagtcatccccagagatagatgaagaccggatccccaacccacatctcaagtccactttggcatgataattcgaactgatcacttttttaataaaaggggcatttggaaaaaaaaaaaaaaggtagcagtcgacagatgaattctgcagatctgtggcttctagctgcccgggtggcatccctgtgacccctccccagtgcctctcctggccctggaagttgccactccagtgcccaccagccttgtcctaataaaattaagttgcatcattttgtctgactaggtgtccttctataatattatggggtggaggggggtggtatggagcaaggggcaagttgggaagacaacctgtagggcctgcggggtctattgggaaccaagctggagtgcagtggcacaatcttggctcactgcaatctccgcctcctgggttcaagcgattctcctgcctcagcctcccgagttgttgggattccaggcatgcatgaccaggctcagctaatttttgtttttttggtagagacggggtttcaccatattggccaggctggtctccaactcctaatctcaggtgatctacccaccttggcctcccaaattgctgggattacaggcgtgaaccactgctcccttccctgtccttctgattttaaaaaaaagagaaatgttctggcacctgcacttgcactggggacagcctattttgctagtttgttttgtttcgttttgttttgatggagagcgtatgttgtttaaacgcggccgcaggaacccctagtgatggagttggccactccctctctgcgcgctcgctcgctcactgaggccgggcgaccaaaggtcgcccgacgcccgggctttgcccgggcggcctcagtgagcgagcgagcgcgcagagagggagtggccaa

SEQ ID NO: 435 - DNA, 1983 bp, Artificial Sequence
  Description of Artificial Sequence: Synthetic polynucleotide
  I-1c.v23 (I-to-I)
ctgcgcgctcgctcgctcactgaggccgcccgggcaaagcccgggcgtcgggcgacctttggtcgcccggcctcagtgagcgagcgagcgcgcagagagggagtggcgcgccacgcgtggatctaatagtaatcaattacggggtcattagttcatagcccatatatggagttccgcgttacataacttacggtaaatggcccgcctggctgaccgcccaacgacccccgcccattgacgtcaataatgacgtatgttcccatagtaacgccaatagggactttccattgacgtcaatgggtggagtatttacggtaaactgcccacttggcagtacatcaagtgtatcatatgccaagtccgccccctattgacgtcaatgacggtaaatggcccgcctggcattatgcccagtacatgaccttacgggactttcctacttggcagtacatctacgtattagtcatcgctattaccatggtgatgcggttttggcagtacaccaatgggcgtggatagcggtttgactcacggggatttccaagtctccaccccattgacgtcaatgggagtttgttttggcaccaaaatcaacgggactttccaaaatgtcgtaataaccccgccccgttgacgcaaatgggcggtaggcgtgtacggtgggaggtctatataagcagagctcgtttagtgaaccgtcagatcactagtgcttctgacacaacagtctcgaacttaagctgcagaagttggtcgtgaggcactgggcaggtaagtatcaaggttacaagacaggtttaaggagaccaatagaaactgggcttgtcgagacagagaagactcttgcgtttctgataggcacctattggtcttactgacatccactttgcctttctctccacaggtgtccactcccagttcaatagtactgccaccatggaacaggacaacagcccccggaagatccagttcaccgtgcccctgctggaaccccacctggaccccgaggccgccgagcagatccggcggagaaggcccgaccccgccaccctggtgctgaccagcgaccagagcagccccgagatcgacgaggaccgaatccccaacccccacctgaagagcaccctggcctgatgattcgaactgatcacttttttaataaaaggggcatttggaaaaaaaaaaaaaaggtagcagtcgacagatgaattctgcagatctgtggcttctagctgcccgggtggcatccctgtgacccctccccagtgcctctcctggccctggaagttgccactccagtgcccaccagccttgtcctaataaaattaagttgcatcattttgtctgactaggtgtccttctataatattatggggtggaggggggtggtatggagcaaggggcaagttgggaagacaacctgtagggcctgcggggtctattgggaaccaagctggagtgcagtggcacaatcttggctcactgcaatctccgcctcctgggttcaagcgattctcctgcctcagcctcccgagttgttgggattccaggcatgcatgaccaggctcagctaatttttgtttttttggtagagacggggtttcaccatattggccaggctggtctccaactcctaatctcaggtgatctacccaccttggcctcccaaattgctgggattacaggcgtgaaccactgctcccttccctgtccttctgattttaaaaaaaagagaaatgttctggcacctgcacttgcactggggacagcctattttgctagtttgttttgtttcgttttgttttgatggagagcgtatgttgtttaaacgcggccgcaggaacccctagtgatggagttggccactccctctctgcgcgctcgctcgctcactgaggccgggcgaccaaaggtcgcccgacgcccgggctttgcccgggcggcctcagtgagcgagcgagcgcgcagagagggagtggccaa

SEQ ID NO: 436 - DNA, 1556 bp, Artificial Sequence
  Description of Artificial Sequence: Synthetic polynucleotide
  I-1c.v24 (I-to-I)
ctgcgcgctcgctcgctcactgaggccgcccgggcaaagcccgggcgtcgggcgacctttggtcgcccggcctcagtgagcgagcgagcgcgcagagagggagtggcgcgccacgcgtggatctaatagtaatcaattacggggtcattagttcatagcccatatatggagttccgcgttacataacttacggtaaatggcccgcctggctgaccgcccaacgacccccgcccattgacgtcaataatgacgtatgttcccatagtaacgccaatagggactttccattgacgtcaatgggtggagtatttacggtaaactgcccacttggcagtacatcaagtgtatcatatgccaagtccgccccctattgacgtcaatgacggtaaatggcccgcctggcattatgcccagtacatgaccttacgggactttcctacttggcagtacatctacgtattagtcatcgctattaccatggtgatgcggttttggcagtacaccaatgggcgtggatagcggtttgactcacggggatttccaagtctccaccccattgacgtcaatgggagtttgttttggcaccaaaatcaacgggactttccaaaatgtcgtaataaccccgccccgttgacgcaaatgggcggtaggcgtgtacggtgggaggtctatataagcagagctcgtttagtgaaccgtcagatcactagtgcttctgacacaacagtctcgaacttaagctgcagaagttggtcgtgaggcactgggcaggtaagtatcaaggttacaagacaggtttaaggagaccaatagaaactgggcttgtcgagacagagaagactcttgcgtttctgataggcacctattggtcttactgacatccactttgcctttctctccacaggtgtccactcccagttcaatagtactgccaccatggaacaggacaacagcccccggaagatccagttcaccgtgcccctgctggaaccccacctggaccccgaggccgccgagcagatccggcggagaaggcccgaccccgccaccctggtgctgaccagcgaccagagcagccccgagatcgacgaggaccgaatccccaacccccacctgaagagcaccctggcctgatgagggccgcgacactagatcataatcagccataccacatttgtagaggttttacttgctttaaaaaacctcccacacctccccctgaacctgaaacataaaatgaatgcaattgttgttgttaacttgtttattgcagcttataatggttacaaataaagcaatagcatcacaaatttcacaaataaagcatttttttcactgcattctagttgtggtttgtccaaactcatcaatgtatcttaaggcgggaattgatctgtttaaacgcggccgcaggaacccctagtgatggagttggccactccctctctgcgcgctcgctcgctcactgaggccgggcgaccaaaggtcgcccgacgcccgggctttgcccgggcggcctcagtgagcgagcgagcgcgcagagagggagtggccaa

SEQ ID NO: 437 - DNA, 1983 bp, Artificial Sequence
  Description of Artificial Sequence: Synthetic polynucleotide
  I-1c.v25 (I-to-I)
ctgcgcgctcgctcgctcactgaggccgcccgggcaaagcccgggcgtcgggcgacctttggtcgcccggcctcagtgagcgagcgagcgcgcagagagggagtggcgcgccacgcgtggatctaatagtaatcaattacggggtcattagttcatagcccatatatggagttccgcgttacataacttacggtaaatggcccgcctggctgaccgcccaacgacccccgcccattgacgtcaataatgacgtatgttcccatagtaacgccaatagggactttccattgacgtcaatgggtggagtatttacggtaaactgcccacttggcagtacatcaagtgtatcatatgccaagtccgccccctattgacgtcaatgacggtaaatggcccgcctggcattatgcccagtacatgaccttacgggactttcctacttggcagtacatctacgtattagtcatcgctattaccatggtgatgcggttttggcagtacaccaatgggcgtggatagcggtttgactcacggggatttccaagtctccaccccattgacgtcaatgggagtttgttttggcaccaaaatcaacgggactttccaaaatgtcgtaataaccccgccccgttgacgcaaatgggcggtaggcgtgtacggtgggaggtctatataagcagagctcgtttagtgaaccgtcagatcactagtgcttctgacacaacagtctcgaacttaagctgcagaagttggtcgtgaggcactgggcaggtaagtatcaaggttacaagacaggtttaaggagaccaatagaaactgggcttgtcgagacagagaagactcttgcgtttctgataggcacctattggtcttactgacatccactttgcctttctctccacaggtgtccactcccagttcaatagtactgccaccatggaacaggacaacagccccaggaagatccagttcacagtgcccctgctggaaccccacctggaccctgaggctgctgagcagatcaggaggagaaggcctgaccctgccaccctggtgctgaccagtgaccagagcagccctgagattgacgaggacaggattcccaacccccacctgaagagcaccctggcctgataattcgaactgatcacttttttaataaaaggggcatttggaaaaaaaaaaaaaaggtagcagtcgacagatgaattctgcagatctgtggcttctagctgcccgggtggcatccctgtgacccctccccagtgcctctcctggccctggaagttgccactccagtgcccaccagccttgtcctaataaaattaagttgcatcattttgtctgactaggtgtccttctataatattatggggtggaggggggtggtatggagcaaggggcaagttgggaagacaacctgtagggcctgcggggtctattgggaaccaagctggagtgcagtggcacaatcttggctcactgcaatctccgcctcctgggttcaagcgattctcctgcctcagcctcccgagttgttgggattccaggcatgcatgaccaggctcagctaatttttgtttttttggtagagacggggtttcaccatattggccaggctggtctccaactcctaatctcaggtgatctacccaccttggcctcccaaattgctgggattacaggcgtgaaccactgctcccttccctgtccttctgattttaaaaaaaagagaaatgttctggcacctgcacttgcactggggacagcctattttgctagtttgttttgtttcgttttgttttgatggagagcgtatgttgtttaaacgcggccgcaggaacccctagtgatggagttggccactccctctctgcgcgctcgctcgctcactgaggccgggcgaccaaaggtcgcccgacgcccgggctttgcccgggcggcctcagtgagcgagcgagcgcgcagagagggagtggccaa

SEQ ID NO: 438 - DNA, 1562 bp, Artificial Sequence
  Description of Artificial Sequence: Synthetic polynucleotide
  I-1c.v26 (I-to-I)
ctgcgcgctcgctcgctcactgaggccgcccgggcaaagcccgggcgtcgggcgacctttggtcgcccggcctcagtgagcgagcgagcgcgcagagagggagtggcgcgccacgcgtggatctaatagtaatcaattacggggtcattagttcatagcccatatatggagttccgcgttacataacttacggtaaatggcccgcctggctgaccgcccaacgacccccgcccattgacgtcaataatgacgtatgttcccatagtaacgccaatagggactttccattgacgtcaatgggtggagtatttacggtaaactgcccacttggcagtacatcaagtgtatcatatgccaagtccgccccctattgacgtcaatgacggtaaatggcccgcctggcattatgcccagtacatgaccttacgggactttcctacttggcagtacatctacgtattagtcatcgctattaccatggtgatgcggttttggcagtacaccaatgggcgtggatagcggtttgactcacggggatttccaagtctccaccccattgacgtcaatgggagtttgttttggcaccaaaatcaacgggactttccaaaatgtcgtaataaccccgccccgttgacgcaaatgggcggtaggcgtgtacggtgggaggtctatataagcagagctcgtttagtgaaccgtcagatcactagtgcttctgacacaacagtctcgaacttaagctgcagaagttggtcgtgaggcactgggcaggtaagtatcaaggttacaagacaggtttaaggagaccaatagaaactgggcttgtcgagacagagaagactcttgcgtttctgataggcacctattggtcttactgacatccactttgcctttctctccacaggtgtccactcccagttcaatagtactgccaccatggaacaggacaacagccccaggaagatccagttcacagtgcccctgctggaaccccacctggaccctgaggctgctgagcagatcaggaggagaaggcctgaccctgccaccctggtgctgaccagtgaccagagcagccctgagattgacgaggacaggattcccaacccccacctgaagagcaccctggcctgataattcgaagggccgcgacactagatcataatcagccataccacatttgtagaggttttacttgctttaaaaaacctcccacacctccccctgaacctgaaacataaaatgaatgcaattgttgttgttaacttgtttattgcagcttataatggttacaaataaagcaatagcatcacaaatttcacaaataaagcatttttttcactgcattctagttgtggtttgtccaaactcatcaatgtatcttaaggcgggaattgatctgtttaaacgcggccgcaggaacccctagtgatggagttggccactccctctctgcgcgctcgctcgctcactgaggccgggcgaccaaaggtcgcccgacgcccgggctttgcccgggcggcctcagtgagcgagcgagcgcgcagagagggagtggccaa

SEQ ID NO: 439 - DNA, 1983 bp, Artificial Sequence
  Description of Artificial Sequence: Synthetic polynucleotide
  I-1c.v27 (I-to-I)
ctgcgcgctcgctcgctcactgaggccgcccgggcaaagcccgggcgtcgggcgacctttggtcgcccggcctcagtgagcgagcgagcgcgcagagagggagtggcgcgccacgcgtggatctaatagtaatcaattacggggtcattagttcatagcccatatatggagttccgcgttacataacttacggtaaatggcccgcctggctgaccgcccaacgacccccgcccattgacgtcaataatgacgtatgttcccatagtaacgccaatagggactttccattgacgtcaatgggtggagtatttacggtaaactgcccacttggcagtacatcaagtgtatcatatgccaagtccgccccctattgacgtcaatgacggtaaatggcccgcctggcattatgcccagtacatgaccttacgggactttcctacttggcagtacatctacgtattagtcatcgctattaccatggtgatgcggttttggcagtacaccaatgggcgtggatagcggtttgactcacggggatttccaagtctccaccccattgacgtcaatgggagtttgttttggcaccaaaatcaacgggactttccaaaatgtcgtaataaccccgccccgttgacgcaaatgggcggtaggcgtgtacggtgggaggtctatataagcagagctcgtttagtgaaccgtcagatcactagtgcttctgacacaacagtctcgaacttaagctgcagaagttggtcgtgaggcactgggcaggtaagtatcaaggttacaagacaggtttaaggagaccaatagaaactgggcttgtcgagacagagaagactcttgcgtttctgataggcacctattggtcttactgacatccactttgcctttctctccacaggtgtccactcccagttcaatagtactgccaccatggaacaggacaacagccccagaaagatccagttcactgtgcccctgctggaaccccacctggacccagaggcagcagagcagatcagaagaagaaggccagacccagccaccctggtgctgacctctgaccagagcagcccagagattgacgaggacagaatccccaacccccacctgaagagcaccctggcctgataattcgaactgatcacttttttaataaaaggggcatttggaaaaaaaaaaaaaaggtagcagtcgacagatgaattctgcagatctgtggcttctagctgcccgggtggcatccctgtgacccctccccagtgcctctcctggccctggaagttgccactccagtgcccaccagccttgtcctaataaaattaagttgcatcattttgtctgactaggtgtccttctataatattatggggtggaggggggtggtatggagcaaggggcaagttgggaagacaacctgtagggcctgcggggtctattgggaaccaagctggagtgcagtggcacaatcttggctcactgcaatctccgcctcctgggttcaagcgattctcctgcctcagcctcccgagttgttgggattccaggcatgcatgaccaggctcagctaatttttgtttttttggtagagacggggtttcaccatattggccaggctggtctccaactcctaatctcaggtgatctacccaccttggcctcccaaattgctgggattacaggcgtgaaccactgctcccttccctgtccttctgattttaaaaaaaagagaaatgttctggcacctgcacttgcactggggacagcctattttgctagtttgttttgtttcgttttgttttgatggagagcgtatgttgtttaaacgcggccgcaggaacccctagtgatggagttggccactccctctctgcgcgctcgctcgctcactgaggccgggcgaccaaaggtcgcccgacgcccgggctttgcccgggcggcctcagtgagcgagcgagcgcgcagagagggagtggccaa

SEQ ID NO: 440 - DNA, 1562 bp, Artificial Sequence
  Description of Artificial Sequence: Synthetic polynucleotide
  I-1c.v28 (I-to-I)
ctgcgcgctcgctcgctcactgaggccgcccgggcaaagcccgggcgtcgggcgacctttggtcgcccggcctcagtgagcgagcgagcgcgcagagagggagtggcgcgccacgcgtggatctaatagtaatcaattacggggtcattagttcatagcccatatatggagttccgcgttacataacttacggtaaatggcccgcctggctgaccgcccaacgacccccgcccattgacgtcaataatgacgtatgttcccatagtaacgccaatagggactttccattgacgtcaatgggtggagtatttacggtaaactgcccacttggcagtacatcaagtgtatcatatgccaagtccgccccctattgacgtcaatgacggtaaatggcccgcctggcattatgcccagtacatgaccttacgggactttcctacttggcagtacatctacgtattagtcatcgctattaccatggtgatgcggttttggcagtacaccaatgggcgtggatagcggtttgactcacggggatttccaagtctccaccccattgacgtcaatgggagtttgttttggcaccaaaatcaacgggactttccaaaatgtcgtaataaccccgccccgttgacgcaaatgggcggtaggcgtgtacggtgggaggtctatataagcagagctcgtttagtgaaccgtcagatcactagtgcttctgacacaacagtctcgaacttaagctgcagaagttggtcgtgaggcactgggcaggtaagtatcaaggttacaagacaggtttaaggagaccaatagaaactgggcttgtcgagacagagaagactcttgcgtttctgataggcacctattggtcttactgacatccactttgcctttctctccacaggtgtccactcccagttcaatagtactgccaccatggaacaggacaacagccccagaaagatccagttcactgtgcccctgctggaaccccacctggacccagaggcagcagagcagatcagaagaagaaggccagacccagccaccctggtgctgacctctgaccagagcagcccagagattgacgaggacagaatccccaacccccacctgaagagcaccctggcctgataattcgaagggccgcgacactagatcataatcagccataccacatttgtagaggttttacttgctttaaaaaacctcccacacctccccctgaacctgaaacataaaatgaatgcaattgttgttgttaacttgtttattgcagcttataatggttacaaataaagcaatagcatcacaaatttcacaaataaagcatttttttcactgcattctagttgtggtttgtccaaactcatcaatgtatcttaaggcgggaattgatctgtttaaacgcggccgcaggaacccctagtgatggagttggccactccctctctgcgcgctcgctcgctcactgaggccgggcgaccaaaggtcgcccgacgcccgggctttgcccgggcggcctcagtgagcgagcgagcgcgcagagagggagtggccaa

SEQ ID NO: 441 - DNA, 1608 bp, Artificial Sequence
  Description of Artificial Sequence: Synthetic polynucleotide
  CHF plasmid map
cctgcgcgctcgctcgctcactgaggccgcccgggcaaagcccgggcgtcgggcgacctttggtcgcccggcctcagtgagcgagcgagcgcgcagagagggagtggaattcacgcgtggatctaatagtaatcaattacggggtcattagttcatagcccatatatggagttccgcgttacataacttacggtaaatggcccgcctggctgaccgcccaacgacccccgcccattgacgtcaataatgacgtatgttcccatagtaacgccaatagggactttccattgacgtcaatgggtggagtatttacggtaaactgcccacttggcagtacatcaagtgtatcatatgccaagtccgccccctattgacgtcaatgacggtaaatggcccgcctggcattatgcccagtacatgaccttacgggactttcctacttggcagtacatctacgtattagtcatcgctattaccatggtgatgcggttttggcagtacaccaatgggcgtggatagcggtttgactcacggggatttccaagtctccaccccattgacgtcaatgggagtttgttttggcaccaaaatcaacgggactttccaaaatgtcgtaataaccccgccccgttgacgcaaatgggcggtaggcgtgtacggtgggaggtctatataagcagagctcgtttagtgaaccgtcagatcactagaagctttattgcggtagtttatcacagttaaattgctaacgcagtcagtgcttctgacacaacagtctcgaacttaagctgcagaagttggtcgtgaggcactgggcaggtaagtatcaaggttacaagacaggtttaaggagaccaatagaaactgggcttgtcgagacagagaagactcttgcgtttctgataggcacctattggtcttactgacatccactttgcctttctctccacaggtgtccactcccagttcaattacagctcttaaggctagagtacttaatacgactcactataggctagcctcgacggtaccgccaccatggaacaggacaacagcccccggaagatccagttcaccgtgcccctgctggaaccccacctggaccccgaggccgccgagcagatccggcggagaaggcccgaccccgccaccctggtgctgaccagcgaccagagcagccccgagatcgacgaggaccggatccccaacccccacctgaagagcaccctggcctgatgagggccgcgactctagatcataatcagccataccacatttgtagaggttttacttgctttaaaaaacctcccacacctccccctgaacctgaaacataaaatgaatgcaattgttgttgttaacttgtttattgcagcttataatggttacaaataaagcaatagcatcacaaatttcacaaataaagcatttttttcactgcattctagttgtggtttgtccaaactcatcaatgtatcttaaggcgggaattgatctgaggaacccctagtgatggagttggccactccctctctgcgcgctcgctcgctcactgaggccgcccgggcaaagcccgggcgtcgggcgacctttggtcgcccggcctca

SEQ ID NO: 442 - DNA, 634 bp, Artificial Sequence
  Description of Artificial Sequence: Synthetic polynucleotide
  plasmid map (AAV2i8.sc-CMV.I1c)
taatagtaatcaattacggggtcattagttcatagcccatatatggagttccgcgttacataacttacggtaaatggcccgcctggctgaccgcccaacgacccccgcccattgacgtcaataatgacgtatgttcccatagtaacgccaatagggactttccattgacgtcaatgggtggagtatttacggtaaactgcccacttggcagtacatcaagtgtatcatatgccaagtccgccccctattgacgtcaatgacggtaaatggcccgcctggcattatgcccagtacatgaccttacgggactttcctacttggcagtacatctacgtattagtcatcgctattaccatggtgatgcggttttggcagtacaccaatgggcgtggatagcggtttgactcacggggatttccaagtctccaccccattgacgtcaatgggagtttgttttggcaccaaaatcaacgggactttccaaaatgtcgtaataaccccgccccgttgacgcaaatgggcggtaggcgtgtacggtgggaggtctatataagcagagctcgtttagtgaaccgtcagatcactagaagctttattgcggtagtttatcacagttaaattgctaacgcagtca

SEQ ID NO: 443 - DNA, 133 bp, Artificial Sequence
  Description of Artificial Sequence: Synthetic polynucleotide
  intron sequence (AAV2i8.sc-CMV.I1c)
gtaagtatcaaggttacaagacaggtttaaggagaccaatagaaactgggcttgtcgagacagagaagactcttgcgtttctgataggcacctattggtcttactgacatccactttgcctttctctccacag

SEQ ID NO: 444 - DNA, 201 bp, Artificial Sequence; identical to SEQ ID NO: 385
  Description of Artificial Sequence: Synthetic polynucleotide
  I-1c (AAV2i8.sc-CMV.I1c)

SEQ ID NO: 445 - DNA, 218 bp, Artificial Sequence; identical to SEQ ID NO: 334
  Description of Artificial Sequence: Synthetic polynucleotide
  polyA (AAV2i8.sc-CMV.I1c)

SEQ ID NO: 446-449 - skipped (4 entries)

SEQ ID NO: 450 - DNA, 3660 bp, Homo sapiens
  VEGF (VEGF-A) aa sequence
gcggaggcttggggcagccgggtagctcggaggtcgtggcgctgggggctagcaccagcgctctgtcgggaggcgcagcggttaggtggaccggtcagcggactcaccggccagggcgctcggtgctggaatttgatattcattgatccgggttttatccctcttcttttttcttaaacatttttttttaaaactgtattgtttctcgttttaatttatttttgcttgccattccccacttgaatcgggccgacggcttggggagattgctctacttccccaaatcactgtggattttggaaaccagcagaaagaggaaagaggtagcaagagctccagagagaagtcgaggaagagagagacggggtcagagagagcgcgcgggcgtgcgagcagcgaaagcgacaggggcaaagtgagtgacctgcttttgggggtgaccgccggagcgcggcgtgagccctcccccttgggatcccgcagctgaccagtcgcgctgacggacagacagacagacaccgcccccagccccagctaccacctcctccccggccggcggcggacagtggacgcggcggcgagccgcgggcaggggccggagcccgcgcccggaggcggggtggagggggtcggggctcgcggcgtcgcactgaaacttttcgtccaacttctgggctgttctcgcttcggaggagccgtggtccgcgcgggggaagccgagccgagcggagccgcgagaagtgctagctcgggccgggaggagccgcagccggaggagggggaggaggaagaagagaaggaagaggagagggggccgcagtggcgactcggcgctcggaagccgggctcatggacgggtgaggcggcggtgtgcgcagacagtgctccagccgcgcgcgctccccaggccctggcccgggcctcgggccggggaggaagagtagctcgccgaggcgccgaggagagcgggccgccccacagcccgagccggagagggagcgcgagccgcgccggccccggtcgggcctccgaaaccatgaactttctgctgtcttgggtgcattggagccttgccttgctgctctacctccaccatgccaagtggtcccaggctgcacccatggcagaaggaggagggcagaatcatcacgaagtggtgaagttcatggatgtctatcagcgcagctactgccatccaatcgagaccctggtggacatcttccaggagtaccctgatgagatcgagtacatcttcaagccatcctgtgtgcccctgatgcgatgcgggggctgctgcaatgacgagggcctggagtgtgtgcccactgaggagtccaacatcaccatgcagattatgcggatcaaacctcaccaaggccagcacataggagagatgagcttcctacagcacaacaaatgtgaatgcagaccaaagaaagatagagcaagacaagaaaaaaaatcagttcgaggaaagggaaaggggcaaaaacgaaagcgcaagaaatcccggtataagtcctggagcgtgtacgttggtgcccgctgctgtctaatgccctggagcctccctggcccccatccctgtgggccttgctcagagcggagaaagcatttgtttgtacaagatccgcagacgtgtaaatgttcctgcaaaaacacagactcgcgttgcaaggcgaggcagcttgagttaaacgaacgtacttgcagatgtgacaagccgaggcggtgagccgggcaggaggaaggagcctccctcagggtttcgggaaccagatctctcaccaggaaagactgatacagaacgatcgatacagaaaccacgctgccgccaccacaccatcaccatcgacagaacagtccttaatccagaaacctgaaatgaaggaagaggagactctgcgcagagcactttgggtccggagggcgagactccggcggaagcattcccgggcgggtgacccagcacggtccctcttggaattggattcgccattttatttttcttgctgctaaatcaccgagcccggaagattagagagttttatttctgggattcctgtagacacacccacccacatacatacatttatatatatatatattatatatatataaaaataaatatctctattttatatatataaaatatatatattctttttttaaattaacagtgctaatgttattggtgtcttcactggatgtatttgactgctgtggacttgagttgggaggggaatgttcccactcagatcctgacagggaagaggaggagatgagagactctggcatgatcttttttttgtcccacttggtggggccagggtcctctcccctgcccaggaatgtgcaaggccagggcatgggggcaaatatgacccagttttgggaacaccgacaaacccagccctggcgctgagcctctctaccccaggtcagacggacagaaagacagatcacaggtacagggatgaggacaccggctctgaccaggagtttggggagcttcaggacattgctgtgctttggggattccctccacatgctgcacgcgcatctcgcccccaggggcactgcctggaagattcaggagcctgggcggccttcgcttactctcacctgcttctgagttgcccaggagaccactggcagatgtcccggcgaagagaagagacacattgttggaagaagcagcccatgacagctccccttcctgggactcgccctcatcctcttcctgctccccttcctggggtgcagcctaaaaggacctatgtcctcacaccattgaaaccactagttctgtccccccaggagacctggttgtgtgtgtgtgagtggttgaccttcctccatcccctggtccttcccttcccttcccgaggcacagagagacagggcaggatccacgtgcccattgtggaggcagagaaaagagaaagtgttttatatacggtacttatttaatatccctttttaattagaaattaaaacagttaatttaattaaagagtagggttttttttcagtattcttggttaatatttaatttcaactatttatgagatgtatcttttgctctctcttgctctcttatttgtaccggtttttgtatataaaattcatgtttccaatctctctctccctgatcggtgacagtcactagcttatcttgaacagatatttaattttgctaacactcagctctgccctccccgatcccctggctccccagcacacattcctttgaaataaggtttcaatatacatctacatactatatatatatttggcaacttgtatttgtgtgtatatatatatatatatgtttatgtatatatgtgattctgataaaatagacattgctattctgttttttatatgtaaaaacaaaacaagaaaaaatagagaattctacatactaaatctctctccttttttaattttaatatttgttatcatttatttattggtgctactgtttatccgtaataattgtggggaaaagatattaacatcacgtctttgtctctagtgcagtttttcgagatattccgtagtacatatttatttttaaacaacgacaaagaaatacagatatatcttaaaaaaaaaaaagcattttgtattaaagaatttaattctgatctcaaa

SEQ ID NO: 451 - DNA, 2933 bp, Homo sapiens
  activin A
cctttcccctggagatttgaacgctgcttgcatgggagaaaagctacttagagaagaaaacgttccacttagtaacagaagaaaagtcttggttaaaaagttgtcatgaatttggcttttggagagaggcagcaagcctggagcattggtaagcgtcacactgccaaagtgagagctgctggagaactcataatcccaggaacgcctcttctactctccgagtaccccagtgaccagagtgagagaagctctgaacgagggcacgcggcttgaaggactgtgggcagatgtgaccaagagcctgcattaagttgtacaatggtagatggagtgatgattcttcctgtgcttatcatgattgctctcccctcccctagtatggaagatgagaagcccaaggtcaaccccaaactctacatgtgtgtgtgtgaaggtctctcctgcggtaatgaggaccactgtgaaggccagcagtgcttttcctcactgagcatcaacgatggcttccacgtctaccagaaaggctgcttccaggtttatgagcagggaaagatgacctgtaagaccccgccgtcccctggccaagccgtggagtgctgccaaggggactggtgtaacaggaacatcacggcccagctgcccactaaaggaaaatccttccctggaacacagaatttccacttggaggttggcctcattattctctctgtagtgttcgcagtatgtcttttagcctgcctgctgggagttgctctccgaaaatttaaaaggcgcaaccaagaacgcctcaatccccgagacgtggagtatggcactatcgaagggctcatcaccaccaatgttggagacagcactttagcagatttattggatcattcgtgtacatcaggaagtggctctggtcttccttttctggtacaaagaacagtggctcgccagattacactgttggagtgtgtcgggaaaggcaggtatggtgaggtgtggaggggcagctggcaaggggagaatgttgccgtgaagatcttctcctcccgtgatgagaagtcatggttcagggaaacggaattgtacaacactgtgatgctgaggcatgaaaatatcttaggtttcattgcttcagacatgacatcaagacactccagtacccagctgtggttaattacacattatcatgaaatgggatcgttgtacgactatcttcagcttactactctggatacagttagctgccttcgaatagtgctgtccatagctagtggtcttgcacatttgcacatagagatatttgggacccaagggaaaccagccattgcccatcgagatttaaagagcaaaaatattctggttaagaagaatggacagtgttgcatagcagatttgggcctggcagtcatgcattcccagagcaccaatcagcttgatgtggggaacaatccccgtgtgggcaccaagcgctacatggcccccgaagttctagatgaaaccatccaggtggattgtttcgattcttataaaagggtcgatatttgggcctttggacttgttttgtgggaagtggccaggcggatggtgagcaatggtatagtggaggattacaagccaccgttctacgatgtggttcccaatgacccaagttttgaagatatgaggaaggtagtctgtgtggatcaacaaaggccaaacatacccaacagatggttctcagacccgacattaacctctctggccaagctaatgaaagaatgctggtatcaaaatccatccgcaagactcacagcactgcgtatcaaaaagactttgaccaaaattgataattccctcgacaaattgaaaactgactgttgacattttcatagtgtcaagaaggaagatttgacgttgttgtcattgtccagctgggacctaatgctggcctgactggttgtcagaatggaatccatctgtctccctccccaaatggctgctttgacaaggcagacgtcgtacccagccatgtgttggggagacatcaaaaccaccctaacctcgctcgatgactgtgaactgggcatttcacgaactgttcacactgcagagactaatgttggacagacactgttgcaaaggtagggactggaggaacacagagaaatcctaaaagagatctgggcattaagtcagtggctttgcatagctttcacaagtctcctagacactccccacgggaaactcaaggaggtggtgaatttttaatcagcaatattgcctgtgcttctcttctttattgcactaggaattctttgcattccttacttgcactgttactcttaattttaaagacccaacttgccaaaatgttggctgcgtactccactggtctgtctttggataataggaattcaatttggcaaaacaaaatgtaatgtcagactttgctgcattttacacatgtgctgatgtttacaatgatgccgaacattaggaattgtttatacacaactttgcaaattatttattacttgtgcacttagtagtttttacaaaactgctttgtgcatatgttaaagcttatttttatgtggtcttatgattttattacagaaatgtttttaacactatactctaaaatggacattttcttttattatcagttaaaatcacattttaagtgcttcacatttgtatgtgtgtagactgtaactttttttcagttcatatgcagaacgtatttagccattacccacgtgacaccaccgaatatattactgatttagaagcaaagatttcagtagaattttagtcctgaacgctacggggaaaatgcattttcttcagaattatccattacgtgcatttaaactctgccagaaaaaaataactattttgttttaatctactttttgtatttagtagttatttgtataaattaaataaactgttttcaagtcaaa

SEQ ID NO: 452 - DNA, 3218 bp, Homo sapiens
  activin B
actcggctcgcctcgcggcgggcgccctcgtcgccagcggcgcaccatggacgggctgcccggtcgggcgctgggggccgcctgccttctgctgctggcggccggctggctggggcctgaggcctggggctcacccacgcccccgccgacgcctgccgcgccgccgccacccccgccacccggatccccgggtggctcgcaggacacctgtacgtcgtgcggcggcttccggcggccagaggagctcggccgagtggacggcgacttcctggaggcggtgaagcggcacatcttgagccgcctgcagatgcggggccggcccaacatcacgcacgccgtgcctaaggccgccatggtcacggccctgcgcaagctgcacgcgggcaaggtgcgcgaggacggccgcgtggagatcccgcacctcgacggccacgccagcccgggcgccgacggccaggagcgcgtttccgaaatcatcagcttcgccgagacagatggcctcgcctcctcccgggtccgcctatacttcttcatctccaacgaaggcaaccagaacctgtttgtggtccaggccagcctgtggctttacctgaaactcctgccctacgtcctggagaagggcagccggcggaaggtgcgggtcaaagtgtacttccaggagcagggccacggtgacaggtggaacatggtggagaagagggtggacctcaagcgcagcggctggcataccttcccactcacggaggccatccaggccttgtttgagcggggcgagcggcgactcaacctagacgtgcagtgtgacagctgccaggagctggccgtggtgccggtgttcgtggacccaggcgaagagtcgcaccggccctttgtggtggtgcaggctcggctgggcgacagcaggcaccgcattcgcaagcgaggcctggagtgcgatggccggaccaacctctgttgcaggcaacagttcttcattgacttccgcctcatcggctggaacgactggatcatagcacccaccggctactacgggaactactgtgagggcagctgcccagcctacctggcaggggtccccggctctgcctcctccttccacacggctgtggtgaaccagtaccgcatgcggggtctgaaccccggcacggtgaactcctgctgcattcccaccaagctgagcaccatgtccatgctgtacttcgatgatgagtacaacatcgtcaagcgggacgtgcccaacatgattgtggaggagtgcggctgcgcctgacagtgcaaggcaggggcacggtggtggggcacggagggcagtcccgggtgggcttcttccagcccccgcgggaacgggggtacacggtgggctgagtacagtcattctgttgggctgtggagatagtgccagggtgcggcctgagatatttttctacagcttcatagagcaaccagtcaaaaccagagcgagaaccctcaactgacatgaaatactttaaaatgcacacgtagccacgcacagccagacgcatcctgccacccacacagcagcctccaggataccagcaaatggatgcggtgacaaatggcagcttagctacaaatgcctgtcagtcggagagaatggggtgagcagccaccattcccaccagctggcccggccactctgaattgcgccttccgagcacacataaaagcacaaagacagagacgcagagagagagagagagccacggagaggaaaagcagatgcaggggtggggagcgcagctcggcggaggctgcgtgtgccccgtggcttttaccaggcctgctctgcctggctcgatgtctgcttcttccccagcctgggatccttcgtgcttcaaggcctggggagcctgtccttccatgcccttgtcgagggaaagagacccagaaaggacacaacccgtcagagacctgggagcaggggcaatgaccgtttgactgtttgtggcttgggcctctgacatgacttatgtgtgtgtgtgtttttggggtggggagggagggagagaagagggggctaaatttgatgctttaactgatctccaacagttgacaggtcatccttgccagttgtataactgaaaaaggacttttctaccaggtatgaccttttaagtgaaaatctgaattgttctaaatggaaagaaaaaaagttgcaatctgtgcccttcattggggacattcctctaggactggtttggggacgggtgggaatgacccctaggcaaggggatgagaccgcaggaggaaatggcggggaggaggcattcttgaactgctgaggatggggggtgtcccctcagcggaggccaagggaggggagcagcctagttggtcttggagagatggggaaggctttcagctgatttgcagaagttgcccatgtgggccccagccatcagggctggccgtggacgtggcccctgcccactcacctgcccgcctgcccgcccgcccgcatagcacttgcagacctgcctgaacgcacatgacatagcacttgccgatctgcgtgtgtccagaagtggcccttggccgagcgccgaactcgctcgccctctagatgtccaagtgccacgtgaactatgcaatttaaagggttgacccacactagacgaaactggactcgtacgactctttttatattttttatacttgaaatgaaatcctttgcttcttttttaagcgaatgattgcttttaatgtttgcactgatttagttgcatgattagtcagaaactgccatttgaaaaaaagttatttttatagcagcaaaaaaaaaaaaaaaagaatacagttaaatgtattatacataattttggaaccaaagaggccaacagatcagttttaattttattagacggtgaggccatctgagatgaggtggacgttctgagcagtcccttgagtggcctgccaacgtttcagggtatgaatggattttgtttattcggtttgatgtgtcttttccatccttacacacccagaaggtagagtaaaaatgactatgatagaatgcaggtgtgtatccttaaatcctcatctttatgtttatttaataaagctccccttagattctgtttcataataatttaaaaccaaacaattttcccatagacttgctgttaaagtattgtacgtttgtgtacagtttaagaaaataaaagattgagtgccacgggaaaaaaaaaaaaaaa

SEQ ID NO: 453 - DNA, 7277 bp, Homo sapiens
  insulin-like growth factor (IGF1)
cttctgtttgctaaatctcactgtcactgctaaattcagagcagatagagcctgcgcaatggaataaagtcctcaaaattgaaatgtgacattgctctcaacatctcccatctctctggatttctttttgcttcattattcctgctaaccaattcattttcagactttgtacttcagaagcaatgggaaaaatcagcagtcttccaacccaattatttaagtgctgcttttgtgatttcttgaaggtgaagatgcacaccatgtcctcctcgcatctcttctacctggcgctgtgcctgctcaccttcaccagctctgccacggctggaccggagacgctctgcggggctgagctggtggatgctcttcagttcgtgtgtggagacaggggcttttatttcaacaagcccacagggtatggctccagcagtcggagggcgcctcagacaggcatcgtggatgagtgctgcttccggagctgtgatctaaggaggctggagatgtattgcgcacccctcaagcctgccaagtcagctcgctctgtccgtgcccagcgccacaccgacatgcccaagacccagaaggaagtacatttgaagaacgcaagtagagggagtgcaggaaacaagaactacaggatgtaggaagaccctcctgaggagtgaagagtgacatgccaccgcaggatcctttgctctgcacgagttacctgttaaactttggaacacctaccaaaaaataagtttgataacatttaaaagatgggcgtttcccccaatgaaatacacaagtaaacattccaacattgtctttaggagtgatttgcaccttgcaaaaatggtcctggagttggtagattgctgttgatcttttatcaataatgttctatagaaaagaaaaaaaaaatatatatatatatatatcttagtccctgcctctcaagagccacaaatgcatgggtgttgtatagatccagttgcactaaattcctctctgaatcttggctgctggagccattcattcagcaaccttgtctaagtggtttatgaattgtttccttatttgcacttctttctacacaactcgggctgtttgttttacagtgtctgataatcttgttagtctatacccaccacctcccttcataacctttatatttgccgaatttggcctcctcaaaagcagcagcaagtcgtcaagaagcacaccaattctaacccacaagattccatctgtggcatttgtaccaaatataagttggatgcattttattttagacacaaagctttatttttccacatcatgcttacaaaaaagaataatgcaaatagttgcaactttgaggccaatcatttttaggcatatgttttaaacatagaaagtttcttcaactcaaaagagttccttcaaatgatgagttaatgtgcaacctaattagtaactttcctctttttattttttccatatagagcactatgtaaatttagcatatcaattatacaggatatatcaaacagtatgtaaaactctgttttttagtataatggtgctattttgtagtttgttatatgaaagagtctggccaaaacggtaatacgtgaaagcaaaacaataggggaagcctggagccaaagatgacacaaggggaagggtactgaaaacaccatccatttgggaaagaaggcaaagtccccccagttatgccttccaagaggaacttcagacacaaaagtccactgatgcaaattggactggcgagtccagagaggaaactgtggaatggaaaaagcagaaggctaggaattttagcagtcctggtttctttttctcatggaagaaatgaacatctgccagctgtgtcatggactcaccactgtgtgaccttgggcaagtcacttcacctctctgtgcctcagtttcctcatctgcaaaatgggggcaatatgtcatctacctacctcaaaggggtggtataaggtttaaaaagataaagattcagattttttttaccctgggttgctgtaagggtgcaacatcagggcgcttgagttgctgagatgcaaggaattctataaataacccattcatagcatagctagagattggtgaattgaatgctcctgacatctcagttcttgtcagtgaagctatccaaataactggccaactagttgttaaaagctaacagctcaatctcttaaaacacttttcaaaatatgtgggaagcatttgattttcaatttgattttgaattctgcatttggttttatgaatacaaagataagtgaaaagagagaaaggaaaagaaaaaggagaaaaacaaagagatttctaccagtgaaaggggaattaattactctttgttagcactcactgactcttctatgcagttactacatatctagtaaaacctcgtttaatactataaataatattctattcattttgaaaaacacaatgattccttcttttctaggcaatataaggaaagtgatccaaaatttgaaatattaaaataatatctaataaaaagtcacaaagttatcttctttaacaaactttactcttattcttagctgtatatacatttttttaaaagtttgttaaaatatgcttgactagagtttccagttgaaaggcaaaaacttccatcacaacaagaaatttcccatgcctgctcagaagggtagcccctagctctctgtgaatgtgttttatccattcaactgaaaattggtatcaagaaagtccactggttagtgtactagtccatcatagcctagaaaatgatccctatctgcagatcaagattttctcattagaacaatgaattatccagcattcagatctttctagtcaccttagaactttttggttaaaagtacccaggcttgattatttcatgcaaattctatattttacattcttggaaagtctatatgaaaaacaaaaataacatcttcagtttttctcccactgggtcacctcaaggatcagaggccaggaaaaaaaaaaaaaagactccctggatctctgaatatatgcaaaaagaaggccccatttagtggagccagcaatcctgttcagtcaacaagtattttaactctcagtccaacattatttgaattgagcacctcaagcatgcttagcaatgttctaatcactatggacagatgtaaaagaaactatacatcatttttgccctctgcctgttttccagacatacaggttctgtggaataagatactggactcctcttcccaagatggcacttctttttatttcttgtccccagtgtgtaccttttaaaattattccctctcaacaaaactttataggcagtcttctgcagacttaacgtgttttctgtcatagttagatgtgataattctaagagtgtctatgacttatttccttcacttaattctatccacagtcaaaaatcccccaaggaggaaagctgaaagatgcactgccatattatctttcttaactttttccaacacataatcctctccaactggattataaataaattgaaaataactcattataccaattcactattttattttttaatgaattaaaactagaaaacaaattgatgcaaaccctggaagtcagttgattactatatactacagcagaatgactcagatttcatagaaaggagcaaccaaaatgtcacaacccaaaactttacaagctttgcttcagaattagattgctttataattcttgaatgaggcaatttcaagatatttgtaaaagaacagtaaacattggtaagaatgagctttcaactcataggcttatttccaatttaattgaccatactggatacttaggtcaaatttctgttctctcttccccaaataatattaaagtattatttgaactttttaagatgaggcagttcccctgaaaaagttaatgcagctctccatcagaatccactcttctagggatatgaaaatctcttaacacccaccctacatacacagacacacacacacacacacacacacacacacacacacacattcaccctaaggatccaatggaatactgaaaagaaatcacttccttgaaaattttattaaaaaacaaacaaacaaacaaaaagcctgtccacccttgagaatccttcctctccttggaacgtcaatgtttgtgtagatgaaaccatctcatgctctgtggctccagggtttctgttactattttatgcacttgggagaaggcttagaataaaagatgtagcacattttgctttcccatttattgtttggccagctatgccaatgtggtgctattgtttctttaagaaagtacttgactaaaaaaaaaagaaaaaaagaaaaaaaagaaagcatagacatatttttttaaagtataaaaacaacaattctatagatagatggcttaataaaatagcattaggtctatctagccaccaccacctttcaactttttatcactcacaagtagtgtactgttcaccaaattgtgaatttgggggtgcaggggcaggagttggaaattttttaaagttagaaggctccattgttttgttggctctcaaacttagcaaaattagcaatatattatccaatcttctgaacttgatcaagagcatggagaataaacgcgggaaaaaagatcttataggcaaatagaagaatttaaaagataagtaagttccttattgatttttgtgcactctgctctaaaacagatattcagcaagtggagaaaataagaacaaagagaaaaaatacatagatttacctgcaaaaaatagcttctgccaaatcccccttgggtattctttggcatttactggtttatagaagacattctcccttcacccagacatctcaaagagcagtagctctcatgaaaagcaatcactgatctcatttgggaaatgttggaaagtatttccttatgagatgggggttatctactgataaagaaagaatttatgagaaattgttgaaagagatggctaacaatctgtgaagattttttgtttcttgtttttgttttttttttttttttactttatacagtctttatgaatttcttaatgttcaaaatgacttggttcttttcttctttttttatatcagaatgaggaataataagttaaacccacatagactctttaaaactataggctagatagaaatgtatgtttgacttgttgaagctataatcagactatttaaaatgttttgctatttttaatcttaaaagattgtgctaatttattagagcagaacctgtttggctctcctcagaagaaagaatctttccattcaaatcacatggctttccaccaatattttcaaaagataaatctgatttatgcaatggcatcatttattttaaaacagaagaattgtgaaagtttatgcccctcccttgcaaagaccataaagtccagatctggtaggggggcaacaacaaaaggaaaatgttgttgattcttggttttggattttgttttgttttcaatgctagtgtttaatcctgtagtacatatttgcttattgctattttaatattttataagaccttcctgttaggtattagaaagtgatacatagatatcttttttgtgtaatttctatttaaaaaagagagaagactgtcagaagctttaagtgcatatggtacaggataaagatatcaatttaaataaccaattcctatctggaacaatgcttttgttttttaaagaaacctctcacagataagacagaggcccaggggatttttgaagctgtctttattctgcccccatcccaacccagcccttattattttagtatctgcctcagaattttatagagggctgaccaagctgaaactctagaattaaaggaacctcactgaaaacatatatttcacgtgttccctctttttttttttcctttttgtgagatggggtctcgcactgtcccccaggctggagtgcagtggcatgatctcggctcactgcaacctccacctcctgggtttaagcgattctcctgcctcagcctcctgagtagctgggattacaggcacccaccactatgcccggctaattttttggatttttaatagagacggggttttaccatgttggccaggttggtctcaaactcctgaccttgtgatttgcccgcctcagcctcccaaattgctgggattacaggcatgagccaccacaccctgcccatgtgttccctcttaatgtatgattacatggatcttaaacatgatccttctctcctcattcttcaactatctttgatggggtctttcaaggggaaaaaaatccaagcttttttaaagtaaaaaaaaaaaaagagaggacacaaaaccaaatgttactgctcaactgaaatatgagttaagatggagacagagtttctcctaataaccggagctgaattacctttcactttcaaaaacatgaccttccacaatccttagaatctgcctttttttatattactgaggcctaaaagtaaacattactcattttattttgcccaaaatgcactgatgtaaagtaggaaaaataaaaacagagctctaaaatccctttcaagccacccattgaccccactcaccaactcatagcaaagtcacttctgttaatcccttaatctgattttgtttggatatttatcttgtacccgctgctaaacacactgcaggagggactctgaaacctcaagctgtctacttacatcttttatctgtgtctgtgtatcatgaaaatgtctattcaaaatatcaaaacctttcaaatatcacgcagcttatattcagtttacataaaggccccaaataccatgtcagatctttttggtaaaagagttaatgaactatgagaattgggattacatcatgtattttgcctcatgtatttttatcacacttataggccaagtgtgataaataaacttacagacactgaattaatttcccctgctactttgaaaccagaaaataatgactggccattcgttacatctgtcttagttgaaaagcatattttttattaaattaattctgattgtatttgaaattattattcaattcacttatggcagaggaatatcaatcctaatgacttctaaaaatgtaactaattgaatcattatcttacatttactgtttaataagcatattttgaaaatgtatggctagagtgtcataataaaatggtatatctttctttagtaattacattaaaattagtcatgtttgattaa

SEQ ID NO: 454 - DNA, 2463 bp, Homo sapiens
  bone morphogenic protein
gccagcatgcccggcgtggcccgcctgccgctgctgctcgggctgctgctgctcccgcgtcccggccggccgctggacttggccgactacacctatgacctggcggaggaggacgactcggagcccctcaactacaaagacccctgcaaggcggctgcctttcttggggacattgccctggacgaagaggacctgagggccttccaggtacagcaggctgtggatctcagacggcacacagctcgtaagtcctccatcaaagctgcagttccaggaaacacttctacccccagctgccagagcaccaacgggcagcctcagaggggagcctgtgggagatggagaggtagatcccgtagccggcgggcggcgacgtcccgaccagagcgtgtgtggcccgatggggtcatcccctttgtcattgggggaaacttcactggtagccagagggcagtcttccggcaggccatgaggcactgggagaagcacacctgtgtcaccttcctggagcgcactgacgaggacagctatattgtgttcacctatcgaccttgcgggtgctgctcctacgtgggtcgccgcggcgggggcccccaggccatctccatcggcaagaactgtgacaagttcggcattgtggtccacgagctgggccacgtcgtcggcttctggcacgaacacactcggccagaccgggaccgccacgtttccatcgttcgtgagaacatccagccaggcgttctccactcttcactgctccttctcagctgtggctctagaaatggtgcttccttcccatgttcccttgagtcctccactcaccaggccctctgctggacaggactcttcctcagaccctccccattccccaggctccccttggctgctccccggaccctcagggcaggagtataacttcctgaagatggagcctcaggaggtggagtccctgggggagacctatgacttcgacagcatcatgcattacgctcggaacacattctccaggggcatcttcctggataccattgtccccaagtatgaggtgaacggggtgaaacctcccattggccaaaggacacggctcagcaagggggacattgcccaagcccgcaagctttacaagtgcccagcctgtggagagaccctgcaagacagcacaggcaacttctcctcccctgaataccccaatggctactctgctcacatgcactgcgtgtggcgcatctctgtcacacccggggagaagatcatcctgaacttcacgtccctggacctgtaccgcagccgcctgtgctggtacgactatgtggaggtccgagatggcttctggaggaaggcgcccctccgagggcccaacactggccagggatgacaacctggtatgggagccaggagtcctggcatcattagtcccagatagctgcattactcacttgctgcgagacttcaggccgcttctgcgggtccaaactccctgagcctatcgtctccactgacagccgcctctgggttgaattccgcagcagcagcaattgggttggaaagggcttctttgcagtctacgaagccatctgcgggggtgatgtgaaaaaggactatggccacattcaatcgcccaactacccagacgattaccggcccagcaaagtctgcatctggcggatccaggtgtctgagggcttccacgtgggcctcacattccagtcctttgagattgagcgccacgacagctgtgcctacgactatctggaggtgcgcgacgggcacagtgagagcagcaccctcatcgggcgctactgtggctatgagaagcctgatgacatcaagagcacgtccagccgcctctggctcaagttcgtctctgacgggtccattaacaaagcgggctttgccgtcaactttttcaaagaggtggacgagtgctctcggcccaaccgcgggggctgtgagcagcggtgcctcaacaccctgggcagctacaagtgcagctgtgaccccgggtacgagctggccccagacaagcgccgctgtgaggctgcttgtggcggattcctcaccaagctcaacggctccatcaccagcccgggctggcccaaggagtacccccccaacaagaactgcatctggcagctggtggcccccacccagtaccgcatctccctgcagtttgacttctttgagacagagggcaatgatgtgtgcaagtacgacttcgtggaggtgcgcagtggactcacagctgactccaagctgcatggcaagttctgtggttctgagaagcccgaggtcatcacctcccagtacaacaacatgcgcgtggagttcaagtccgacaacaccgtgtccaaaaagggcttcaaggcccacttcttctcagaaaagaggccagctctgcagccccctcggggacgcccccaccagctcaaattccgagtgcagaaaagaaaccggaccccccag

SEQ ID NO: 455 - DNA, 3748 bp, Homo sapiens
  fibroblast growth factor
agagctgcagtagcctggaggttcagagagccgggctactctgagaagaagacaccaagtggattctgcttcccctgggacagcactgagcgagtgtggagagaggtacagccctcggcctacaagctctttagtcttgaaagcgccacaagcagcagctgctgagccatggctgaaggggaaatcaccaccttcacagccctgaccgagaagtttaatctgcctccagggaattacaagaagcccaaactcctctactgtagcaacgggggccacttcctgaggatccttccggatggcacagtggatgggacaagggacaggagcgaccagcacattcagctgcagctcagtgcggaaagcgtgggggaggtgtatataaagagtaccgagactggccagtacttggccatggacaccgacgggcttttatacggctcacagacaccaaatgaggaatgtttgttcctggaaaggctggaggagaaccattacaacacctatatatccaagaagcatgcagagaagaattggtttgttggcctcaagaagaatgggagctgcaaacgcggtcctcggactcactatggccagaaagcaatcttgtttctccccctgccagtctcttctgattaaagagatctgttctgggtgttgaccactccagagaagtttcgaggggtcctcacctggttgacccaaaaatgttcccttgaccattggctgcgctaacccccagcccacagagcctgaatttgtaagcaacttgcttctaaatgcccagttcacttctttgcagagccttttacccctgcacagtttagaacagagggaccaaattgcttctaggagtcaactggctggccagtctgggtctgggtttggatctccaattgcctcttgcaggctgagtccctccatgcaaaagtggggctaaatgaagtgtgttaaggggtcggctaagtgggacattagtaactgcacactatttccctctactgagtaaaccctatctgtgattcccccaaacatctggcatggctcccttttgtccttcctgtgccctgcaaatattagcaaagaagcttcatgccaggttaggaaggcagcattccatgaccagaaacagggacaaagaaatccccccttcagaacagaggcatttaaaatggaaaagagagattggattttggtgggtaacttagaaggatggcatctccatgtagaataaatgaagaaagggaggcccagccgcaggaaggcagaataaatccttgggagtcattaccacgccttgaccttcccaaggttactcagcagcagagagccctgggtgacttcaggtggagagcactagaagtggtttcctgataacaagcaaggatatcagagctgggaaattcatgtggatctggggactgagtgtgggagtgcagagaaagaaagggaaactggctgaggggataccataaaaagaggatgatttcagaaggagaaggaaaaagaaagtaatgccacacattgtgcttggcccctggtaagcagaggctttggggtcctagcccagtgcttctccaacactgaagtgcttgcagatcatctggggacctggtttgaatggagattctgattcagtgggttgggggcagagtttctgcagttccatcaggtcccccccaggtgcaggtgctgacaatactgctgccttacccgccatacattaaggagcagggtcctggtcctaaagagttattcaaatgaaggtggttcgacgccccgaacctcacctgacctcaactaacccttaaaaatgcacacctcatgagtctacctgagcattcaggcagcactgacaatagttatgcctgtactaaggagcatgattttaagaggctttggcccaatgcctataaaatgcccatttcgaagatatacaaaaacatacttcaaaaatgttaaacccttaccaacagcttttcccaggagaccatttgtattaccattacttgtataaatacacttcctgcttaaacttgacccaggtggctagcaaattagaaacaccattcatctctaacatatgatactgatgccatgtaaaggcctttaataagtcattgaaatttactgtgagactgtatgttttaattgcatttaaaaatatatagcttgaaagcagttaaactgattagtattcaggcactgagaatgatagtaataggatacaatgtataagctactcacttatctgatacttatttacctataaaatgagatttttgttttccactgtgctattacaaattttcttttgaaagtaggaactcttaagcaatggtaattgtgaataaaaattgatgagagtgttagctcctgtttcatatgaaattgaagtaattgttaactaaaaacaattccttagtaactgaactgtcatatttagaatggaaggaaaatgacagtttgtgaaagttcaaagcaatagtgcaattgaagaattgacctaagtaagctgacattatggttaataatagtattttagatttgtgcagcaaaataatttcataacttttttgtttttgttacttggataagatcaatctgttttattttagtaaatctttgcaggcaagttagagaaaatgcagtgtggcttaacgtctctttagtatgaagatttggccagaaaaagatacccagagaggaaatctaagataattataatggtccatactttttattgtatgaatcaaactcaagcataacattggccaaggaaaattaaataccattgctaacttgtgaaatggaagtctgtgatttcggagatgcaaagcattgtagtaaaaacaccaatgtgacctcgaccatctcagcccagatatcattcatatatctgttcaatgactattaaggtgcctactgtgtgctaggcactgtactggatactggggaccttgtctgtctggtttgctgctgtatcttctcccagggcattatatttatgatgaaagatgctgtggattcaattctttcagtcaagaataaacacagactttgtaggttcctgctgaataaagcaaatcccagaaacccagattttggaagaatcagcaaccccagcataaaataaacccctatcaaaatgtcagaggacatggcaaggtaaacttagcattttcaactttagaaccgggtcagcttcagggggactgctttcaaatcagccaaagagcctgtcagatcttcttagaaggaagaggttggtagttccctgctctgttttgaacatgctctagtttattaacctggggacattcccattgctgtcttaagtaagtctcatagccagctcctgtcacgtgactctcatatggattcattttcgggccagctctgaacaaagcatcatgaacatatgtgcttttggtcgtttgcaatgtgatggtggtggaggtaggtattggtttccttggaaggcatgataagaaagattcacaatggccaacagtgtgtatgaacaaaaaactgattggagcatcagctagtactgaaggtccttgctttgtgtcagaggcaaaggaacccaaggcgccaagtcctcagccttgagtgtactgctgacaactaaactcacaggctgcaaagcagacctctgatgaagatgcctgttatttcacatcactgtctttttgtgtatcatagtctgcaccttacaaatattaataaatgttccaataataggtga

SEQ ID NO: 456 - DNA, 2811 bp, Homo sapiens
  platelet-derived growth factor
acacgcgcgccctgcggagcccgcccaactccggcgagccgggcctgcgcctactcctcctcctcctctcccggcggcggctgcggcggaggcgccgactcggccttgcgcccgccctcaggcccgcgcgggcggcgcagcgaggccccgggcggcgggtggtggctgccaggcggctcggccgcgggcgctgcccggccccggcgagcggagggcggagcgcggcgccggagccgagggcgcgccgcggagggggtgctgggccgcgctgtgcccggccgggcggcggctgcaagaggaggccggaggcgagcgcggggccggcggtgggcgcgcagggcggctcgcagctcgcagccggggccgggccaggcgtccaggcaggtgatcggtgtggcggcggcggcggcggcggccccagactccctccggagttcttcttggggctgatgtccgcaaatatgcagaattaccggccgggtcgctcctgaagccagcgcggggagcgagcgcggcggcggccagcaccgggaacgcaccgaggaagaagcccagcccccgccctccgccccttccgtccccaccccctacccggcggcccaggaggctccccgcgctgcgggcgcgcactccctgtttctcctcctcctggctggcgctgcctgcctctccgcactcactgctcgcgccgggcgcgctccgccagctccgtgctccccgcgccaccctcctccgggccgcgctccctaagggatggtactgaatttcgccgccacaggagaccggctggagcgcccgccccgcggcctcgcctctcctccgagcagccagcgcctcgggacgcgatgaggaccttggcttgcctgctgctcctcggctgcggatacctcgcccatgttctggccgaggaagccgagatcccccgcgaggtgatcgagaggctggcccgcagtcagatccacagcatccgggacctccagcgactcctggagatagactccgtagggagtgaggattctttggacaccagcctgagagctcacggggtccatgccactaagcatgtgcccgagaagcggcccctgcccattcggaggaagagaagcatcgaggaagctgtccccgctgtctgcaagaccaggacggtcatttacgagattcctcggagtcaggtcgaccccacgtccgccaacttcctgatctggcccccgtgcgtggaggtgaaacgctgcaccggctgctgcaacacgagcagtgtcaagtgccagccctcccgcgtccaccaccgcagcgtcaaggtggccaaggtggaatacgtcaggaagaagccaaaattaaaagaagtccaggtgaggttagaggagcatttggagtgcgcctgcgcgaccacaagcctgaatccggattatcgggaagaggacacgggaaggcctagggagtcaggtaaaaaacggaaaagaaaaaggttaaaacccacctaaagcagccaaccagatgtgaggtgaggatgagccgcagccctttcctgggacatggatgtacatggcgtgttacattcctgaacctactatgtacggtgctttattgccagtgtgcggtctttgttctcctccgtgaaaaactgtgtccgagaacactcgggagaacaaagagacagtgcacatttgtttaatgtgacatcaaagcaagtattgtagcactcggtgaagcagtaagaagcttccttgtcaaaaagagagagagagaaagagagagagaaaacaaaaccacaaatgacaaaaacaaaacggactcacaaaaatatctaaactcgatgagatggagggtcgccccgtgggatggaagtgcagaggtctcagcagactggatttctgtccgggtggtcacaggtgcttttttgccgaggatgcagagcctgctttgggaacgactccagaggggtgctggtgggctctgcaggggcccgcaggaagcaggaatgtcttggaaaccgccacgcgaactttagaaaccacacctcctcgctgtagtatttaagcccatacagaaaccttcctgagagccttaagtggtttttttttttgtttttgttttgttttttttttttttgtttttttttttttttttttacaccataaagtgattattaagctttcctttttactctttggctagctttttttttttttttttttttttaattatctcttggatgacatttacaccgataacacacaggctgctgtaactgtcaggacagtgcgacggtatttttcctagcaagatgcaaactaatgagatgtattaaaataaacatggtatacctacctatgcatcatttcctaaatgtttctggctttgtgtttctcccttaccctgctttatttgttaatttaagccattttgaaagaactatgcgtcaaccaatcgtacgccgtccctgcggcacctgccccagagcccgtttgtggctgagtgacaacttgttccccgcagtgcacacctagaatgctgtgttcccacgcggcacgtgagatgcattgccgcttctgtctgtgttgttggtgtgccctggtgccgtggtggcggtcactccctctgctgccagtgtttggacagaacccaaattctttatttttggtaagatattgtgctttacctgtattaacagaaatgtgtgtgtgtggtttgtttttttgtaaaggtgaagtttgtatgtttacctaatattacctgttttgtatacctgagagcctgctatgttctttttttgttgatccaaaattaaaaaaaaaaataccaccaacaaaa

SEQ ID NO: 457 - DNA, 3871 bp, Homo sapiens
  insulin, leukemia inhibitory factor (LIF)
atgaacctctgaaaactgccggcatctgaggtttcctccaaggccctctgaagtgcagcccataatgaaggtcttggcggcaggagttgtgcccctgctgttggttctgcactggaaacatggggcggggagccccctccccatcacccctgtcaacgccacctgtgccatacgccacccatgtcacaacaacctcatgaaccagatcaggagccaactggcacagctcaatggcagtgccaatgccctctttattctctattacacagcccagggggagccgttccccaacaacctggacaagctatgtggccccaacgtgacggacttcccgcccttccacgccaacggcacggagaaggccaagctggtggagctgtaccgcatagtcgtgtaccttggcacctccctgggcaacatcacccgggaccagaagatcctcaaccccagtgccctcagcctccacagcaagctcaacgccaccgccgacatcctgcgaggcctccttagcaacgtgctgtgccgcctgtgcagcaagtaccacgtgggccatgtggacgtgacctacggccctgacacctcgggtaaggatgtcttccagaagaagaagctgggctgtcaactcctggggaagtataagcagatcatcgccgtgttggcccaggccttctagcaggaggtcttgaagtgtgctgtgaaccgagggatctcaggagttgggtccagatgtgggggcctgtccaagggtggctggggcccagggcatcgctaaacccaaatgggggctgctggcagaccccgagggtgcctggccagtccactccactctgggctgggctgtgatgaagctgagcagagtggaaacttccatagggagggagctagaagaaggtgccccttcctctgggagattgtggactggggagcgtgggctggacttctgcctctacttgtccctttggccccttgctcactttgtgcagtgaacaaactacacaagtcatctacaagagccctgaccacagggtgagacagcagggcccaggggagtggaccagcccccagcaaattatcaccatctgtgcctttgctgccccttaggttgggacttaggtgggccagaggggctaggatcccaaaggactccttgtcccctagaagtttgatgagtggaagatagagaggggcctctgggatggaaggctgtcttcttttgaggatgatcagagaacttgggcataggaacaatctggcagaagtttccagaaggaggtcacttggcattcaggctcttggggaggcagagaagccaccttcaggcctgggaaggaagacactgggaggaggagaggcctggaaagctttggtaggttcttcgttctcttccccgtgatcttccctgcagcctgggatggccagggtctgatggctggacctgcagcaggggtttgtggaggtgggtagggcaggggcaggttgctaagtcaggtgcagaggttctgagggacccaggctcttcctctgggtaaaggtctgtaagaaggggctggggtagctcagagtagcagctcacatctgaggccctgggaggccttgtgaggtcacacagaggtacttgagggggactggaggccgtctctggtccccagggcaagggaacagcagaacttagggtcagggtctcagggaaccctgagctccaagcgtgctgtgcgtctgacctggcatgatttctatttattatgatatcctatttatattaacttattggtgctttcagtggccaagttaattcccctttccctggtccctactcaacaaaatatgatgatggctcccgacacaagcgccagggccagggcttagcagggcctggtctggaagtcgacaatgttacaagtggaataagccttacgggtgaagctcagagaagggtcggatctgagagaatggggaggcctgagtgggagtggggggccttgctccacccccccccatcccctactgtgacttgctttagggtgtcagggtccaggctgcaggggctgggccaatttgtggagaggccgggtgcctttctgtcttgattccagggggctggttcacactgttcttgggcgccccagcattgtgttgtgaggcgcactgttcctggcagatattgtgccccctggagcagtgggcaagacagtccttgtggcccaccctgtccttgtttctgtgtccccatgctgcctctgaaatagcgccctggaacaaccctgcccctgcacccagcatgctccgacacagcagggaagctcctcctgtggcccggacacccatagacggtgcggggggcctggctgggccagaccccaggaaggtggggtagactggggggatcagctgcccattgctcccaagaggaggagagggaggctgcagatgcctgggactcagaccaggaagctgtgggccctcctgctccacccccatcccactcccacccatgtctgggctcccaggcagggaacccgatctcttcctttgtgctggggccaggcgagtggagaaacgccctccagtctgagagcaggggagggaaggaggcagcagagttggggcagctgctcagagcagtgttctggcttcttctcaaaccctgagcgggctgccggcctccaagttcctccgacaagatgatggtactaattatggtacttttcactcactttgcacctttccctgtcgctctctaagcactttacctggatggcgcgtgggcagtgtgcaggcaggtcctgaggcctggggttggggtggagggtgcggcccggagttgtccatctgtccatcccaacagcaagacgaggatgtggctgttgagatgtgggccacactcacccttgtccaggatgcagggactgccttctccttcctgcttcatccggcttagcttggggctggctgcattcccccaggatgggcttcgagaaagacaaacttgtctggaaaccagagttgctgattccacccggggggcccggctgactcgcccatcacctcatctccctgtggacttgggagctctgtgccaggcccaccttgcggccctggctctgagtcgctctcccacccagcctggacttggccccatgggacccatcctcagtgctccctccagatcccgtccggcagcttggcgtccaccctgcacagcatcactgaatcacagagcctttgcgtgaaacagctctgccaggccgggagctgggtttctcttccctttttatctgctggtgtggaccacacctgggcctggccggaggaagagagagtttaccaagagagatgtctccgggcccttatttattatttaaacatttttttaaaaagcactgctagtttacttgtctctcctccccatcgtccccatcgtcctccttgtccctgacttggggcacttccaccctgacccagccagtccagctctgccttgccggctctccagagtagacatagtgtgtggggttggagctctggcacccggggaggtagcatttccctgcagatggtacagatgttcctgccttagagtcatctctagttccccacctcaatcccggcatccagccttcagtcccgcccacgtgctagctccgtgggcccaccgtgcggccttagaggtttccctccttcctttccactgaaaagcacatggccttgggtgacaaattcctctttgatgaatgtaccctgtggggatgtttcatactgacagattatttttatttattcaatgtcatatttaaaatatttattttttataccaaatgaatacttttttttttaagaaaaaaaagagaaatgaataaagaatctactcttg

SEQ ID NO: 458 - DNA, 6265 bp, Homo sapiens
  epidermal growth factor (EGF)
caaaaagagaaactgttgggagaggaatcgtatctccatatttcttctttcagccccaatccaagggttgtagctggaactttccatcagttcttcctttctttttcctctctaagcctttgccttgctctgtcacagtgaagtcagccagagcagggctgttaaactctgtgaaatttgtcataagggtgtcaggtatttcttactggcttccaaagaaacatagataaagaaatctttcctgtggcttcccttggcaggctgcattcagaaggtctctcagttgaagaaagagcttggaggacaacagcacaacaggagagtaaaagatgccccagggctgaggcctccgctcaggcagccgcatctggggtcaatcatactcaccttgcccgggccatgctccagcaaaatcaagctgttttcttttgaaagttcaaactcatcaagattatgctgctcactcttatcattctgttgccagtagtttcaaaatttagttttgttagtctctcagcaccgcagcactggagctgtcctgaaggtactctcgcaggaaatgggaattctacttgtgtgggtcctgcacccttcttaattttctcccatggaaatagtatctttaggattgacacagaaggaaccaattatgagcaattggtggtggatgctggtgtctcagtgatcatggattttcattataatgagaaaagaatctattgggtggatttagaaagacaacttttgcaaagagtttttctgaatgggtcaaggcaagagagagtatgtaatatagagaaaaatgtttctggaatggcaataaattggataaatgaagaagttatttggtcaaatcaacaggaaggaatcattacagtaacagatatgaaaggaaataattcccacattcttttaagtgctttaaaatatcctgcaaatgtagcagttgatccagtagaaaggtttatattttggtcttcagaggtggctggaagcctttatagagcagatctcgatggtgtgggagtgaaggctctgttggagacatcagagaaaataacagctgtgtcattggatgtgcttgataagcggctgttttggattcagtacaacagagaaggaagcaattctcttatttgctcctgtgattatgatggaggttctgtccacattagtaaacatccaacacagcataatttgtttgcaatgtccctttttggtgaccgtatcttctattcaacatggaaaatgaagacaatttggatagccaacaaacacactggaaaggacatggttagaattaacctccattcatcatttgtaccacttggtgaactgaaagtagtgcatccacttgcacaacccaaggcagaagatgacacttgggagcctgagcagaaactttgcaaattgaggaaaggaaactgcagcagcactgtgtgtgggcaagacctccagtcacacttgtgcatgtgtgcagagggatacgccctaagtcgagaccggaagtactgtgaagatgttaatgaatgtgctttttggaatcatggctgtactcttgggtgtaaaaacacccctggatcctattactgcacgtgccctgtaggatttgttctgcttcctgatgggaaacgatgtcatcaacttgtttcctgtccacgcaatgtgtctgaatgcagccatgactgtgttctgacatcagaaggtcccttatgtttctgtcctgaaggctcagtgcttgagagagatgggaaaacatgtagcggttgttcctcacccgataatggtggatgtagccagctctgcgttcctcttagcccagtatcctgggaatgtgattgctttcctgggtatgacctacaactggatgaaaaaagctgtgcagcttcaggaccacaaccatttttgctgtttgccaattctcaagatattcgacacatgcattttgatggaacagactatggaactctgctcagccagcagatgggaatggtttatgccctagatcatgaccctgtggaaaataagatatactttgcccatacagccctgaagtggatagagagagctaatatggatggttcccagcgagaaaggcttattgaggaaggagtagatgtgccagaaggtcttgctgtggactggattggccgtagattctattggacagacagagggaaatctctgattggaaggagtgatttaaatgggaaacgttccaaaataatcactaaggagaacatctctcaaccacgaggaattgctgttcatccaatggccaagagattattctggactgatacagggattaatccacgaattgaaagttcttccctccaaggccttggccgtctggttatagccagctctgatctaatctggcccagtggaataacgattgacttcttaactgacaagttgtactggtgcgatgccaagcagtctgtgattgaaatggccaatctggatggttcaaaacgccgaagacttacccagaatgatgtaggtcacccatttgctgtagcagtgtttgaggattatgtgtggttctcagattgggctatgccatcagtaatgagagtaaacaagaggactggcaaagatagagtacgtctccaaggcagcatgctgaagccctcatcactggttgtggttcatccattggcaaaaccaggagcagatccctgcttatatcaaaacggaggctgtgaacatatttgcaaaaagaggcttggaactgcttggtgttcgtgtcgtgaaggttttatgaaagcctcagatgggaaaacgtgtctggctctggatggtcatcagctgttggcaggtggtgaagttgatctaaagaaccaagtaacaccattggacatcttgtccaagactagagtgtcagaagataacattacagaatctcaacacatgctagtggctgaaatcatggtgtcagatcaagatgactgtgctcctgtgggatgcagcatgtatgctcggtgtatttcagagggagaggatgccacatgtcagtgtttgaaaggatttgctggggatggaaaactatgttctgatatagatgaatgtgagatgggtgtcccagtgtgcccccctgcctcctccaagtgcatcaacaccgaaggtggttatgtctgccggtgctcagaaggctaccaaggagatgggattcactgtcttgactctactccaccccctcacctcagggaagatgaccaccactattccgtaagaaatagtgactctgaatgtcccctgtcccacgatgggtactgcctccatgatggtgtgtgcatgtatattgaagcattggacaagtatgcatgcaactgtgttgttggctacatcggggagcgatgtcagtaccgagacctgaagtggtgggaactgcgccacgctggccacgggcagcagcagaaggtcatcgtggtggctgtctgcgtggtggtgcttgtcatgctgctcctcctgagcctgtggggggcccactactacaggactcagaagctgctatcgaaaaacccaaagaatccttatgaggagtcgagcagagatgtgaggagtcgcaggcctgctgacactgaggatgggatgtcctcttgccctcaaccttggtttgtggttataaaagaacaccaagacctcaagaatgggggtcaaccagtggctggtgaggatggccaggcagcagatgggtcaatgcaaccaacttcatggaggcaggagccccagttatgtggaatgggcacagagcaaggctgctggattccagtatccagtgataagggctcctgtccccaggtaatggagcgaagctttcatatgccctcctatgggacacagacccttgaagggggtgtcgagaagccccattctctcctatcagctaacccattatggcaacaaagggccctggacccaccacaccaaatggagctgactcagtgaaaactggaattaaaaggaaagtcaagaagaatgaactatgtcgatgcacagtatcttttctttcaaaagtagagcaaaactataggttttggttccacaatctctacgactaatcacctactcaatgcctggagacagatacgtagttgtgcttttgtttgctcttttaagcagtctcactgcagtcttatttccaagtaagagtactgggagaatcactaggtaacttattagaaacccaaattgggacaacagtgctttgtaaattgtgttgtcttcagcagtcaatacaaatagatttttgtttttgttgttcctgcagccccagaagaaattaggggttaaagcagacagtcacactggtttggtcagttacaaagtaatttctttgatctggacagaacatttatatcagtttcatgaaatgattggaatattacaataccgttaagatacagtgtaggcatttaactcctcattggcgtggtccatgctgatgattttgcaaaatgagttgtgatgaatcaatgaaaaatgtaatttagaaactgatttcttcagaattagatggcttattttttaaaatatttgaatgaaaacattttatttttaaaatattacacaggaggcttcggagtttcttagtcattactgtccttttcccctacagaattttccctcttggtgtgattgcacagaatttgtatgtattttcagttacaagattgtaagtaaattgcctgatttgttttcattatagacaacgatgaatttcttctaattatttaaataaaatcaccaaaaacataaacattttattgtatgcctgattaagtagttaattatagtctaaggcagtactagagttgaaccaaaatgatttgtcaagcttgctgatgtttctgtttttcgttttttttttttttccggagagaggataggatctcactctgttatccaggctggagtgtgcaatggcacaatcatagctcagtgcagcctcaaactcctgggctcaagcaatcctcctgcctcagcctcccgagtaactaggaccacaggcacaggccaccatgcctggctaaggtttttatttttattttttgtagacatggggatcacacaatgttgcccaggctggtcttgaactcctggcctcaagcaaggtcgtgctggtaattttgcaaaatgaattgtgattgactttcagcctcccaacgtattagattataggcattagccatggtgcccagccttgtaacttttaaaaaaattttttaatctacaactctgtagattaaaatttcacatggtgttctaattaaatatttttcttgcagccaagatattgttactacagataacacaacctgatatggtaactttaaattttgggggctttgaatcattcagtttatgcattaactagtccctttgtttatctttcatttctcaaccccttgtactttggtgataccagacatcagaataaaaagaaattgaagtacctgttttcaaatggatactttataggaattttggtaaagatttggtgatgggaggatgacttgaggtttgtggatattagttaattattcagtatgatacctcacccagctaatttagatttttctatattcggttttgctttcattgacaatatcctggaggatcagaagacttgtctatttctgctgagtcactggcctcagaaaaataataaccataatttcccccaaggttttctttacctaagtgtgaatattttttcttcctccaaaagctcacttttgggtttagattaaatttttgtattttagcacctttttcttttaggggttcaatgatgacaaaagaaatgacatgagaacacggctacccataacataccattatctttgtaccagaaaaatccttgtttccttcttaatgactctggtaccttagaaactgggaccctgctaagtccttgactaggctatctaccagctcctggtcggattaaagaaaaaacacactttgtgttttttaatcaccaaggcaccctgcagagatatcttcttcttgcaacttcacatctttatcagtaatgtcctctttcctttaaaaattcaagttttaagaacagcattttcatgtaaaaacttgatttgtgttttttccagactgaatacttttcctccctaactctcatcgtctcattgcgcgcaacgcctgattgagcttctgtttgactaaatatcacctactatgtaaaaaatgagcatattggcctcttttctagcatctaataaaggcttaatacactgta

SEQ ID NO: 459 - DNA, 4114 bp, Homo sapiens
  TGFalpha
actcgggcaccgcaggtagggcaggaggctggagagcctgctgcccgcccgcccgtaaaatggtcccctcggctggacagctcgccctgttcgctctgggtattgtgttggctgcgtgccaggccttggagaacagcacgtccccgctgagtgacccgcccgtggctgcagcagtggtgtcccattttaatgactgcccagattcccacactcagttctgcttccatggaacctgcaggtttttggtgcaggaggacaagccagcatgtgtctgccattctgggtacgttggtgcacgctgtgagcatgcggacctcctggccgtggtggctgccagccagaagaagcaggccatcaccgccttggtggtggtctccatcgtggccctggctgtccttatcatcacatgtgtgctgatacactgctgccaggtccgaaaacactgtgagtggtgccgggccctcatctgccggcacgagaagcccagcgccctcctgaagggaagaaccgcttgctgccactcagaaacagtggtctgaagagcccagaggaggagtttggccaggtggactgtggcagatcaataaagaaaggcttcttcaggacagcactgccagagatgcctgggtgtgccacagaccttcctacttggcctgtaatcacctgtgcagccttttgtgggccttcaaaactctgtcaagaactccgtctgcttggggttattcagtgtgacctagagaagaaatcagcggaccacgatttcaagacttgttaaaaaagaactgcaaagagacggactcctgttcacctaggtgaggtgtgtgcagcagttggtgtctgagtccacatgtgtgcagttgtcttctgccagccatggattccaggctatatatttctttttaatgggccacctccccacaacagaattctgcccaacacaggagatttctatagttattgttttctgtcatttgcctactggggaagaaagtgaaggaggggaaactgtttaatatcacatgaagaccctagctttaagagaagctgtatcctctaaccacgagaccctcaaccagcccaacatcttccatggacacatgacattgaagaccatcccaagctatcgccacccttggagatgatgtcttatttattagatggataatggttttatttttaatctcttaagtcaatgtaaaaagtataaaaccccttcagacttctacattaatgatgtatgtgttgctgactgaaaagctatactgattagaaatgtctggcctcttcaagacagctaaggcttgggaaaagtcttccagggtgcggagatggaaccagaggctgggttactggtaggaataaaggtaggggttcagaaatggtgccattgaagccacaaagccggtaaatgcctcaatacgttctgggagaaaacttagcaaatccatcagcagggatctgtcccctctgttggggagagaggaagagtgtgtgtgtctacacaggataaacccaatacatattgtactgctcagtgattaaatgggttcacttcctcgtgagccctcggtaagtatgtttagaaatagaacattagccacgagccataggcatttcaggccaaatccatgaaagggggaccagtcatttattttccattttgttgcttggttggtttgttgctttatttttaaaaggagaagtttaactttgctatttattttcgagcactaggaaaactattccagtaatttttttttcctcatttccattcaggatgccggctttattaacaaaaactctaacaagtcacctccactatgtgggtcttcctttcccctcaagagaaggagcaattgttcccctgagcatctgggtccatctgacccatggggcctgcctgtgagaaacagtgggtcccttcaaatacatagtggatagctcatccctaggaattttcattaaaatttggaaacagagtaatgaagaaataatatataaactccttatgtgaggaaatgctactaatatctgaaaagtgaaagatttctatgtattaactcttaagtgcacctagcttattacatcgtgaaaggtacatttaaaatatgttaaattggcttgaaattttcagagaattttgtcttcccctaattcttcttccttggtctggaagaacaatttctatgaattttctctttatttttttttataattcagacaattctatgacccgtgtcttcatttttggcactcttatttaacaatgccacacctgaagcacttggatctgttcagagctgaccccctagcaacgtagttgacacagctccaggtttttaaattactaaaataagttcaagtttacatcccttgggccagatatgtgggttgaggcttgactgtagcatcctgcttagagaccaatcaacggacactggtttttagacctctatcaatcagtagttagcatccaagagactttgcagaggcgtaggaatgaggctggacagatggcggaagcagaggttccctgcgaagacttgagatttagtgtctgtgaatgttctagttcctaggtccagcaagtcacacctgccagtgccctcatccttatgcctgtaacacacatgcagtgagaggcctcacatatacgcctccctagaagtgccttccaagtcagtcctttggaaaccagcaggtctgaaaaagaggctgcatcaatgcaagcctggttggaccattgtccatgcctcaggatagaacagcctggcttatttggggatttttcttctagaaatcaaatgactgataagcattggatccctctgccatttaatggcaatggtagtctttggttagctgcaaaaatactccatttcaagttaaaaatgcatcttctaatccatctctgcaagctccctgtgtttccttgccctttagaaaatgaattgttcactacaattagagaatcatttaacatcctgacctggtaagctgccacacacctggcagtggggagcatcgctgtttccaatggctcaggagacaatgaaaagcccccatttaaaaaaataacaaacattttttaaaaggcctccaatactcttatggagcctggatttttcccactgctctacaggctgtgactttttttaagcatcctgacaggaaatgttttcttctacatggaaagatagacagcagccaaccctgatctggaagacagggccccggctggacacacgtggaaccaagccagggatgggctggccattgtgtccccgcaggagagatgggcagaatggccctagagttcttttccctgagaaaggagaaaaagatgggattgccactcacccacccacactggtaagggaggagaatttgtgcttctggagcttctcaagggattgtgttttgcaggtacagaaaactgcctgttatcttcaagccaggttttcgagggcacatgggtcaccagttgctttttcagtcaatttggccgggatggactaatgaggctctaacactgctcaggagacccctgccctctagttggttctgggctttgatctcttccaacctgcccagtcacagaaggaggaatgactcaaatgcccaaaaccaagaacacattgcagaagtaagacaaacatgtatatttttaaatgttctaacataagacctgttctctctagccattgatttaccaggctttctgaaagatctagtggttcacacagagagagagagagtactgaaaaagcaactcctcttcttagtcttaataatttactaaaatggtcaacttttcattatctttattataataaacctgatgcttttttttagaactccttactctgatgtctgtatatgttgcactgaaaaggttaatatttaatgttttaatttattttgtgtggtaagttaattttgatttctgtaatgtgttaatgtgattagcagttattttccttaatatctgaattatacttaaagagtagtgagcaatataagacgcaattgtgtttttcagtaatgtgcattgttattgagttgtactgtaccttatttggaaggatgaaggaatgaatctttttttcctaaa

SEQ ID NO: 460 - DNA, 1956 bp, Homo sapiens
  TDGF1
agtttcccctggacgccttgctcctgcttctgctacgaccttctggggaaaacgaatttctcattttcttcttaaattgccattttcgctttaggagatgaatgttttcctttggctgttttggcaatgactctgaattaaagcgatgctaacgcctcttttccccctaattgttaaaagctatggactgcaggaagatggcccgcttctcttacagtgtgatttggatcatggccatttctaaagtctttgaactgggattagttgccgggctgggccatcaggaatttgctcgtccatctcggggatacctggccttcagagatgacagcatttggccccaggaggagcctgcaattcggcctcggtcttcccagcgtgtgccgcccatggggatacagcacagtaaggagctaaacagaacctgctgcctgaatgggggaacctgcatgctggggtccttttgtgcctgccctccctccttctacggacggaactgtgagcacgatgtgcgcaaagagaactgtgggtctgtgccccatgacacctggctgcccaagaagtgttccctgtgtaaatgctggcacggtcagctccgctgctttcctcaggcatttctacccggctgtgatggccttgtgatggatgagcacctcgtggcttccaggactccagaactaccaccgtctgcacgtactaccacttttatgctagttggcatctgcctttctatacaaagctactattaatcgacattgacctatttccagaaatacaattttagatatcatgcaaatttcatgaccagtaaaggctgctgctacaatgtcctaactgaaagatgatcatttgtagttgccttaaaataatgaatacatttccaaaatggtctctaacatttccttacagaactacttcttacttctttgccctgccctctcccaaaaaactacttcttttttcaaaagaaagtcagccatatctccattgtgcctaagtccagtgtttctttttttttttttttttgagacggagtctcactctgtcacccaggctggactgcaatgacgcgatcttggttcactgcaacctccgcatccggggttcaagccattctcctgcctcagcctcccaagtaactgggattacaggcatgtgtcaccatgcccagctaatttttttgtatttttagtagagatgggggtttcaccatattggccagtctggtctcgaactcctgaccttgtgatccactcgcctcagcctctcgaagtgctgagattacacacgtgagcaactgtgcaaggcctggtgtttcttgatacatgtaattctaccaaggtcttcttaatatgttcttttaaatgattgaattatatgttcagattattggagactaattctaatgtggaccttagaatacagttttgagtagagttgatcaaaatcaattaaaatagtctctttaaaaggaaagaaaacatctttaaggggaggaaccagagtgctgaaggaatggaagtccatctgcgtgtgtgcagggagactgggtaggaaagaggaagcaaatagaagagagaggttgaaaaacaaaatgggttacttgattggtgattaggtggtggtagagaagcaagtaaaaaggctaaatggaagggcaagtttccatcatctatagaaagctatataagacaagaactcccctttttttcccaaaggcattataaaaagaatgaagcctccttagaaaaaaaattatacctcaatgtccccaacaagattgcttaataaattgtgtttcctccaagctattcaattcttttaactgttgtagaagacaaaatgttcacaatatatttagttgtaaaccaagtgatcaaactacatattgtaaagcccatttttaaaatacattgtatatatgtgtatgcacagtaaaaatggaaactatattga

SEQ ID NO: 461 - DNA, 8830 bp, Homo sapiens
  vWF
agctcacagctattgtggtgggaaagggagggtggttggtggatgtcacagcttgggctttatctcccccagcagtggggactccacagcccctgggctacataacagcaagacagtccggagctgtagcagacctgattgagcctttgcagcagctgagagcatggcctagggtgggcggcaccattgtccagcagctgagtttcccagggaccttggagatagccgcagccctcatttgcaggggaagatgattcctgccagatttgccggggtgctgcttgctctggccctcattttgccagggaccctttgtgcagaaggaactcgcggcaggtcatccacggcccgatgcagccttttcggaagtgacttcgtcaacacctttgatgggagcatgtacagctttgcgggatactgcagttacctcctggcagggggctgccagaaacgctccttctcgattattggggacttccagaatggcaagagagtgagcctctccgtgtatcttggggaattttttgacatccatttgtttgtcaatggtaccgtgacacagggggaccaaagagtctccatgccctatgcctccaaagggctgtatctagaaactgaggctgggtactacaagctgtccggtgaggcctatggctttgtggccaggatcgatggcagcggcaactttcaagtcctgctgtcagacagatacttcaacaagacctgcgggctgtgtggcaactttaacatctttgctgaagatgactttatgacccaagaagggaccttgacctcggacccttatgactttgccaactcatgggctctgagcagtggagaacagtggtgtgaacgggcatctcctcccagcagctcatgcaacatctcctctggggaaatgcagaagggcctgtgggagcagtgccagcttctgaagagcacctcggtgtttgcccgctgccaccctctggtggaccccgagccttttgtggccctgtgtgagaagactttgtgtgagtgtgctggggggctggagtgcgcctgccctgccctcctggagtacgcccggacctgtgcccaggagggaatggtgctgtacggctggaccgaccacagcgcgtgcagcccagtgtgccctgctggtatggagtataggcagtgtgtgtccccttgcgccaggacctgccagagcctgcacatcaatgaaatgtgtcaggagcgatgcgtggatggctgcagctgccctgagggacagctcctggatgaaggcctctgcgtggagagcaccgagtgtccctgcgtgcattccggaaagcgctaccctcccggcacctccctctctcgagactgcaacacctgcatttgccgaaacagccagtggatctgcagcaatgaagaatgtccaggggagtgccttgtcacaggtcaatcacacttcaagagctttgacaacagatacttcaccttcagtgggatctgccagtacctgctggcccgggattgccaggaccactccttctccattgtcattgagactgtccagtgtgctgatgaccgcgacgctgtgtgcacccgctccgtcaccgtccggctgcctggcctgcacaacagccttgtgaaactgaagcatggggcaggagttgccatggatggccaggacgtccagctccccctcctgaaaggtgacctccgcatccagcatacagtgacggcctccgtgcgcctcagctacggggaggacctgcagatggactgggatggccgcgggaggctgctggtgaagctgtcccccgtctatgccgggaagacctgcggcctgtgtgggaattacaatggcaaccagggcgacgacttccttaccccctctgggctggcggagccccgggtggaggacttcgggaacgcctggaagctgcacggggactgccaggacctgcagaagcagcacagcgatccctgcgccctcaacccgcgcatgaccaggttctccgaggaggcgtgcgcggtcctgacgtcccccacattcgaggcctgccatcgtgccgtcagcccgctgccctacctgcggaactgccgctacgacgtgtgctcctgctcggacggccgcgagtgcctgtgcggcgccctggccagctatgccgcggcctgcgcggggagaggcgtgcgcgtcgcgtggcgcgagccaggccgctgtgagctgaactgcccgaaaggccaggtgtacctgcagtgcgggaccccctgcaacctgacctgccgctctctctcttacccggatgaggaatgcaatgaggcctgcctggagggctgcttctgccccccagggctctacatggatgagaggggggactgcgtgcccaaggcccagtgcccctgttactatgacggtgagatcttccagccagaagacatcttctcagaccatcacaccatgtgctactgtgaggatggcttcatgcactgtaccatgagtggagtccccggaagcttgctgcctgacgctgtcctcagcagtcccctgtctcatcgcagcaaaaggagcctatcctgtcggccccccatggtcaagctggtgtgtcccgctgacaacctgcgggctgaagggctcgagtgtaccaaaacgtgccagaactatgacctggagtgcatgagcatgggctgtgtctctggctgcctctgccccccgggcatggtccggcatgagaacagatgtgtggccctggaaaggtgtccctgcttccatcagggcaaggagtatgcccctggagaaacagtgaagattggctgcaacacttgtgtctgtcaggaccggaagtggaactgcacagaccatgtgtgtgatgccacgtgctccacgatcggcatggcccactacctcaccttcgacgggctcaaatacctgttccccggggagtgccagtacgttctggtgcaggattactgcggcagtaaccctgggacctttcggatcctagtggggaataagggatgcagccacccctcagtgaaatgcaagaaacgggtcaccatcctggtggagggaggagagattgagctgtttgacggggaggtgaatgtgaagaggcccatgaaggatgagactcactttgaggtggtggagtctggccggtacatcattctgctgctgggcaaagccctctccgtggtctgggaccgccacctgagcatctccgtggtcctgaagcagacataccaggagaaagtgtgtggcctgtgtgggaattttgatggcatccagaacaatgacctcaccagcagcaacctccaagtggaggaagaccctgtggactttgggaactcctggaaagtgagctcgcagtgtgctgacaccagaaaagtgcctctggactcatcccctgccacctgccataacaacatcatgaagcagacgatggtggattcctcctgtagaatccttaccagtgacgtcttccaggactgcaacaagctggtggaccccgagccatatctggatgtctgcatttacgacacctgctcctgtgagtccattggggactgcgcctgcttctgcgacaccattgctgcctatgcccacgtgtgtgcccagcatggcaaggtggtgacctggaggacggccacattgtgcccccagagctgcgaggagaggaatctccgggagaacgggtatgagtgtgagtggcgctataacagctgtgcacctgcctgtcaagtcacgtgtcagcaccctgagccactggcctgccctgtgcagtgtgtggagggctgccatgcccactgccctccagggaaaatcctggatgagcttttgcagacctgcgttgaccctgaagactgtccagtgtgtgaggtggctggccggcgttttgcctcaggaaagaaagtcaccttgaatcccagtgaccctgagcactgccagatttgccactgtgatgttgtcaacctcacctgtgaagcctgccaggagccgggaggcctggtggtgcctcccacagatgccccggtgagccccaccactctgtatgtggaggacatctcggaaccgccgttgcacgatttctactgcagcaggctactggacctggtcttcctgctggatggctcctccaggctgtccgaggctgagtttgaagtgctgaaggcctttgtggtggacatgatggagcggctgcgcatctcccagaagtgggtccgcgtggccgtggtggagtaccacgacggctcccacgcctacatcgggctcaaggaccggaagcgaccgtcagagctgcggcgcattgccagccaggtgaagtatgcgggcagccaggtggcctccaccagcgaggtcttgaaatacacactgttccaaatcttcagcaagatcgaccgccctgaagcctcccgcatcaccctgctcctgatggccagccaggagccccaacggatgtcccggaactttgtccgctacgtccagggcctgaagaagaagaaggtcattgtgatcccggtgggcattgggccccatgccaacctcaagcagatccgcctcatcgagaagcaggcccctgagaacaaggccttcgtgctgagcagtgtggatgagctggagcagcaaagggacgagatcgttagctacctctgtgaccttgcccctgaagcccctcctcctactctgccccccgacatggcacaagtcactgtgggcccggggctcttgggggtttcgaccctggggcccaagaggaactccatggttctggatgtggcgttcgtcctggaaggatcggacaaaattggtgaagccgacttcaacaggagcaaggagttcatggaggaggtgattcagcggatggatgtgggccaggacagcatccacgtcacggtgctgcagtactcctacatggtgactgtggagtaccccttcagcgaggcacagtccaaaggggacatcctgcagcgggtgcgagagatccgctaccagggcggcaacaggaccaacactgggctggccctgcggtacctctctgaccacagcttcttggtcagccagggtgaccgggagcaggcgcccaacctggtctacatggtcaccggaaatcctgcctctgatgagatcaagaggctgcctggagacatccaggtggtgcccattggagtgggccctaatgccaacgtgcaggagctggagaggattggctggcccaatgcccctatcctcatccaggactttgagacgctcccccgagaggctcctgacctggtgctgcagaggtgctgctccggagaggggctgcagatccccaccctctcccctgcacctgactgcagccagcccctggacgtgatccttctcctggatggctcctccagtttcccagcttcttattttgatgaaatgaagagtttcgccaaggctttcatttcaaaagccaatatagggcctcgtctcactcaggtgtcagtgctgcagtatggaagcatcaccaccattgacgtgccatggaacgtggtcccggagaaagcccatttgctgagccttgtggacgtcatgcagcgggagggaggccccagccaaatcggggatgccttgggctttgctgtgcgatacttgacttcagaaatgcatggtgccaggccgggagcctcaaaggcggtggtcatcctggtcacggacgtctctgtggattcagtggatgcagcagctgatgccgccaggtccaacagagtgacagtgttccctattggaattggagatcgctacgatgcagcccagctacggatcttggcaggcccagcaggcgactccaacgtggtgaagctccagcgaatcgaagacctccctaccatggtcaccttgggcaattccttcctccacaaactgtgctctggatttgttaggatttgcatggatgaggatgggaatgagaagaggcccggggacgtctggaccttgccagaccagtgccacaccgtgacttgccagccagatggccagaccttgctgaagagtcatcgggtcaactgtgaccgggggctgaggccttcgtgccctaacagccagtcccctgttaaagtggaagagacctgtggctgccgctggacctgcccctgcgtgtgcacaggcagctccactcggcacatcgtgacctttgatgggcagaatttcaagctgactggcagctgttcttatgtcctatttcaaaacaaggagcaggacctggaggtgattctccataatggtgcctgcagccctggagcaaggcagggctgcatgaaatccatcgaggtgaagcacagtgccctctccgtcgagctgcacagtgacatggaggtgacggtgaatgggagactggtctctgttccttacgtgggtgggaacatggaagtcaacgtttatggtgccatcatgcatgaggtcagattcaatcaccttggtcacatcttcacattcactccacaaaacaatgagttccaactgcagctcagccccaagacttttgcttcaaagacgtatggtctgtgtgggatctgtgatgagaacggagccaatgacttcatgctgagggatggcacagtcaccacagactggaaaacacttgttcaggaatggactgtgcagcggccagggcagacgtgccagcccatcctggaggagcagtgtcttgtccccgacagctcccactgccaggtcctcctcttaccactgtttgctgaatgccacaaggtcctggctccagccacattctatgccatctgccagcaggacagttgccaccaggagcaagtgtgtgaggtgatcgcctcttatgcccacctctgtcggaccaacggggtctgcgttgactggaggacacctgatttctgtgctatgtcatgcccaccatctctggtctacaaccactgtgagcatggctgtccccggcactgtgatggcaacgtgagctcctgtggggaccatccctccgaaggctgtttctgccctccagataaagtcatgttggaaggcagctgtgtccctgaagaggcctgcactcagtgcattggtgaggatggagtccagcaccagttcctggaagcctgggtcccggaccaccagccctgtcagatctgcacatgcctcagcgggcggaaggtcaactgcacaacgcagccctgccccacggccaaagctcccacgtgtggcctgtgtgaagtagcccgcctccgccagaatgcagaccagtgctgccccgagtatgagtgtgtgtgtgacccagtgagctgtgacctgcccccagtgcctcactgtgaacgtggcctccagcccacactgaccaaccctggcgagtgcagacccaacttcacctgcgcctgcaggaaggaggagtgcaaaagagtgtccccaccctcctgccccccgcaccgtttgcccacccttcggaagacccagtgctgtgatgagtatgagtgtgcctgcaactgtgtcaactccacagtgagctgtccccttgggtacttggcctcaactgccaccaatgactgtggctgtaccacaaccacctgccttcccgacaaggtgtgtgtccaccgaagcaccatctaccctgtgggccagttctgggaggagggctgcgatgtgtgcacctgcaccgacatggaggatgccgtgatgggcctccgcgtggcccagtgctcccagaagccctgtgaggacagctgtcggtcgggcttcacttacgttctgcatgaaggcgagtgctgtggaaggtgcctgccatctgcctgtgaggtggtgactggctcaccgcggggggactcccagtcttcctggaagagtgtcggctcccagtgggcctccccggagaacccctgcctcatcaatgagtgtgtccgagtgaaggaggaggtctttatacaacaaaggaacgtctcctgcccccagctggaggtccctgtctgcccctcgggctttcagctgagctgtaagacctcagcgtgctgcccaagctgtcgctgtgagcgcatggaggcctgcatgctcaatggcactgtcattgggcccgggaagactgtgatgatcgatgtgtgcacgacctgccgctgcatggtgcaggtgggggtcatctctggattcaagctggagtgcaggaagaccacctgcaacccctgccccctgggttacaaggaagaaaataacacaggtgaatgttgtgggagatgtttgcctacggcttgcaccattcagctaagaggaggacagatcatgacactgaagcgtgatgagacgctccaggatggctgtgatactcacttctgcaaggtcaatgagagaggagagtacttctgggagaagagggtcacaggctgcccaccctttgatgaacacaagtgtctggctgagggaggtaaaattatgaaaattccaggcacctgctgtgacacatgtgaggagcctgagtgcaacgacatcactgccaggctgcagtatgtcaaggtgggaagctgtaagtctgaagtagaggtggatatccactactgccagggcaaatgtgccagcaaagccatgtactccattgacatcaacgatgtgcaggaccagtgctcctgctgctctccgacacggacggagcccatgcaggtggccctgcactgcaccaatggctctgttgtgtaccatgaggttctcaatgccatggagtgcaaatgctcccccaggaagtgcagcaagtgaggctgctgcagctgcatgggtgcctgctgctgcctgccttggcctgatggccaggccagagtgctgccagtcctctgcatgttctgctcttgtgcccttctgagcccacaataaaggctgagctcttatcttgcaaaa

SEQ ID NO: 462 - DNA, 3416 bp, Homo sapiens
  GATA-4
ggggacttggaggcggccggcgcaggggccgcgagaggcttcgtcgccgctgcagctccgggggctcccaggggagcgtgcgcggaacctccaggcccagcaggaccccggctgcggcgaggaggaaggagccagcctagcagcttctgcgcctgtggccgcgggtgtcctggaggcctctcggtgtgacgagtgggggacccgaaggctcgtgcgccacctccaggcctggacgctgccctccgtcttctgcccccaataggtgcgccggaccttcaggccctggggtgaattcagctgctcctacatcagcttccggaaccaccaaaaattcaaattgggattttccggagtaaacaagagcctagagccctttgctcaatgctggatttaatacgtatatatttttaagcgagttggttttttcccctttgatttttgatcttcgcgacagttcctcccacgcatattatcgttgttgccgtcgttttctctccccgcgtggctccttgacctgcgagggagagagaggacaccgaagccgggagctcgcagggaccatgtatcagagcttggccatggccgccaaccacgggccgccccccggtgcctacgaggcgggcggccccggcgccttcatgcacggcgcgggcgccgcgtcctcgccagtctacgtgcccacaccgcgggtgccctcctccgtgctgggcctgtcctacctccagggcggaggcgcgggctctgcgtccggaggcgcctcgggcggcagctccggtggggccgcgtctggtgcggggcccgggacccagcagggcagcccgggatggagccaggcgggagccgacggagccgcttacaccccgccgccggtgtcgccgcgcttctccttcccggggaccaccgggtccctggcggccgccgccgccgctgccgcggcccgggaagctgcggcctacagcagtggcggcggagcggcgggtgcgggcctggcgggccgcgagcagtacgggcgcgccggcttcgcgggctcctactccagcccctacccggcttacatggccgacgtgggcgcgtcctgggccgcagccgccgccgcctccgccggccccttcgacagcccggtcctgcacagcctgcccggccgggccaacccggccgcccgacaccccaatctcgatatgtttgacgacttctcagaaggcagagagtgtgtcaactgtggggctatgtccaccccgctctggaggcgagatgggacgggtcactatctgtgcaacgcctgcggcctctaccacaagatgaacggcatcaaccggccgctcatcaagcctcagcgccggctgtccgcctcccgccgagtgggcctctcctgtgccaactgccagaccaccaccaccacgctgtggcgccgcaatgcggagggcgagcctgtgtgcaatgcctgcggcctctacatgaagctccacggggtccccaggcctcttgcaatgcggaaagaggggatccaaaccagaaaacggaagcccaagaacctgaataaatctaagacaccagcagctccttcaggcagtgagagccttcctcccgccagcggtgcttccagcaactccagcaacgccaccaccagcagcagcgaggagatgcgtcccatcaagacggagcctggcctgtcatctcactacgggcacagcagctccgtgtcccagacgttctcagtcagtgcgatgtctggccatgggccctccatccaccctgtcctctcggccctgaagctctccccacaaggctatgcgtctcccgtcagccagtctccacagaccagctccaagcaggactcttggaacagcctggtcttggccgacagtcacggggacataatcactgcgtaatcttccctcttccctcctcaaattcctgcacggacctgggacttggaggatagcaaagaaggaggccctgggctcccaggggccggcctcctctgcctggtaatgactccagaacaacaactgggaagaaacttgaagtcgacaatctggttaggggaagcgggtgttggattttctcagatgcctttacacgctgatgggactggagggagcccacccttcagcacgagcacactgcatctctcctgtgagttggagacttctttcccaagatgtccttgtcccctgcgttccccactgtggcctagaccgtgggttttgcattgtgtttctagcaccgaggatctgagaacaagcggagggccgggccctgggacccctgctccagcccgaatgacggcatctgtttgccatgtacctggatgcgacgggcccctggggacaggcccttgccccatccatccgcttgaggcatggcaccgccctgcatccctaataccaaatctgactccaaaattgtggggtgtgacatacaagtgactgaacacttcctggggagctacaggggcacttaacccaccacagcacagcctcatcaaaatgcagctggcaacttctcccccaggtgccttccccctgctgccggcctttgctccttcacttccaacatctctcaaaataaaaatccctcttcccgctctgagcgattcagctctgcccgcagcttgtacatgtctctcccctggcaaaacaagagctgggtagtttagccaaacggcaccccctcgagttcactgcagacccttcgttcaccgtgtcacacatagaggggttctgagtaagaacaaaacgttctgctgctcaagccagtctggcaagcactcagcccagcctcgaggtccttctggggagagtgtaagtggacagagtcctggtcagggggcaggagtgtcccaagggctggcccacctgctgtctgtctgctcctcctagcccttggtcagatggcagccagagtccctcaggacctgcagcctcgccccggcagaagtcttttgtccaggaggcaaaaagccagagattctgcaacacgaattcgaagcaaacaaacacaacacaacagaattcctggaaagaagacgactgctaagacacggcaggggggcctggagggagcctccgactctgagctgctccgggatctgccgcgttctcctctgcacattgctgtttctgcccctgatgctggagctcaaggagactccttcctctttctcagcagagctgtagctgactgtggcattactacgcctccccacacgcccagacccctcactccaaaatcctactggctgtagcagagaatacctttgaaccaagattctgttttaatcatcatttacattgttttcttccaaaggccccctcgtataccctccctaacccacaaacctgttaacattgtcttaaggtgaaatggctggaaaatcagtatttaactaataaatttatctgtattcctctttc

SEQ ID NO: 463 - DNA, 1850 bp, Homo sapiens
  Nkx2.5
acatccagagctggccgacgggtgcgcgggcgggcggcggcaccatgcagggaagctgccaggggccgtgggcagcgccgctttctgccgcccacctggcgctgtgagactggcgctgccaccatgttccccagccctgctctcacgcccacgcccttctcagtcaaagacatcctaaacctggaacagcagcagcgcagcctggctgccgccggagagctctctgcccgcctggaggcgaccctggcgccctcctcctgcatgctggccgccttcaagccagaggcctacgctgggcccgaggcggctgcgccgggcctcccagagctgcgcgcagagctgggccgcgcgccttcaccggccaagtgtgcgtctgcctttcccgccgcccccgccttctatccacgtgcctacagcgaccccgacccagccaaggaccctagagccgaaaagaaagcctgaaattttaagtcaccgtctgtctccctcaccagggtgtgaactgccccgagggcagagacctcccgttttgttctccagcgccttgagccagcctgactttctacaaatgctgagtgagacgtgtcggtggctcccagtgcacttggcagagtgagccgcagccagctgggcgctccaggcaggacacagtggcctccacgaggatcccttaccattactgtgcggccgcgctccgtaggtcaagccgctcttaccaagcgtctctctgcctctctgttccccctcagagctgtgcgcgctgcagaaggcggtggagctggagaagacagaggcggacaacgcggagcggccccgggcgcgacggcggaggaagccgcgcgtgctcttctcgcaggcgcaggtctatgagctggagcggcgcttcaagcagcagcggtacctgtcggcccccgaacgcgaccagctggccagcgtgctgaaactcacgtccacgcaggtcaagatctggttccagaaccggcgctacaagtgcaagcggcagcggcaggaccagactctggagctggtggggctgcccccgccgccgccgccgcctgcccgcaggatcgcggtgccagtgctggtgcgcgatggcaagccatgcctaggggactcggcgccctacgcgcctgcctacggcgtgggcctcaatccctacggttataacgcctaccccgcctatccgggttacggcggcgcggcctgcagccctggctacagctgcactgccgcttaccccgccgggccttccccagcgcagccggccactgccgccgccaacaacaacttcgtgaacttcggcgtcggggacttgaatgcggttcagagccccgggattccgcagagcaactcgggagtgtccacgctgcatggtatccgagcctggtagggaagggacccgcgtggcgcgaccctgaccgatcccacctcaacagctccctgactctcggggggagaaggggctcccaacatgaccctgagtcccctggattttgcattcactcctgcggagacctaggaactttttctgtcccacgcgcgtttgttcttgcgcacgggagagtttgtggcggcgattatgcagcgtgcaatgagtgatcctgcagcctggtgtcttagctgtccccccaggagtgccctccgagagtccatgggcacccccggttggaactgggactgagctcgggcacgcagggcctgagatctggccgcccattccgcgagccagggccgggcgcccgggcctttgctatctcgccgtcgcccgcccacgcacccacccgtatttatgtttttacctattgctgtaagaaatgacgatccccttcccattaaagagagtgcgttga

SEQ ID NO: 464 - DNA, 7281 bp, Homo sapiens
  Mef2-C
gcagtcacagacacttgagcacacgcgtacacccagacatcttcgggctgctattggattgactttgaaggttctgtgtgggtcgccgtggctgcatgtttgaatcaggtggagaagcacttcaacgctggacgaagtaaagattattgttgttattttttttttctctctctctctctcttaagaaaggaaaatatcccaaggactaatctgatcgggtcttccttcatcaggaacgaatgcaggaatttgggaactgagctgtgcaagtgctgaagaaggagatttgtttggaggaaacaggaaagagaaagaaaaggaaggaaaaaatacataatttcagggacgagagagagaagaaaaacggggactatggggagaaaaaagattcagattacgaggattatggatgaacgtaacagacaggtgacatttacaaagaggaaatttgggttgatgaagaaggcttatgagctgagcgtgctgtgtgactgtgagattgcgctgatcatcttcaacagcaccaacaagctgttccagtatgccagcaccgacatggacaaagtgcttctcaagtacacggagtacaacgagccgcatgagagccggacaaactcagacatcgtggagacgttgagaaagaagggccttaatggctgtgacagcccagaccccgatgcggacgattccgtaggtcacagccctgagtctgaggacaagtacaggaaaattaacgaagatattgatctaatgatcagcaggcaaagattgtgtgctgttccacctcccaacttcgagatgccagtctccatcccagtgtccagccacaacagtttggtgtacagcaaccctgtcagctcactgggaaaccccaacctattgccactggctcacccttctctgcagaggaatagtatgtctcctggtgtaacacatcgacctccaagtgcaggtaacacaggtggtctgatgggtggagacctcacgtctggtgcaggcaccagtgcagggaacgggtatggcaatccccgaaactcaccaggtctgctggtctcacctggtaacttgaacaagaatatgcaagcaaaatctcctcccccaatgaatttaggaatgaataaccgtaaaccagatctccgagttcttattccaccaggcagcaagaatacgatgccatcagtgtctgaggatgtcgacctgcttttgaatcaaaggataaataactcccagtcggctcagtcattggctaccccagtggtttccgtagcaactcctactttaccaggacaaggaatgggaggatatccatcagccatttcaacaacatatggtaccgagtactctctgagtagtgcagacctgtcatctctgtctgggtttaacaccgccagcgctcttcaccttggttcagtaactggctggcaacagcaacacctacataacatgccaccatctgccctcagtcagttgggagcttgcactagcactcatttatctcagagttcaaatctctccctgccttctactcaaagcctcaacatcaagtcagaacctgtttctcctcctagagaccgtaccaccaccccttcgagatacccacaacacacgcgccacgaggcggggagatctcctgttgacagcttgagcagctgtagcagttcgtacgacgggagcgaccgagaggatcaccggaacgaattccactcccccattggactcaccagaccttcgccggacgaaagggaaagtccctcagtcaagcgcatgcgactttctgaaggatgggcaacatgatcagattattacttactagtttttttttttttcttgcagtgtgtgtgtgtgctataccttaatggggaaggggggtcgatatgcattatatgtgccgtgtgtggaaaaaaaaaaagtcaggtactctgttttgtaaaagtacttttaaattgcctcagtgatacagtataaagataaacagaaatgctgagataagcttagcacttgagttgtacaacagaacacttgtacaaaatagattttaaggctaacttcttttcactgttgtgctcctttgcaaaatgtatgttacaatagatagtgtcatgttgcaggttcaacgttatttacatgtaaatagacaaaaggaaacatttgccaaaagcggcagatctttactgaaagagagagcagctgttatgcaacatatagaaaaatgtatagatgcttggacagacccggtaatgggtggccattggtaaatgttaggaacacaccaggtcacctgacatcccaagaatgctcacaaacctgcaggcatatcattggcgtatggcactcattaaaaaggatcagagaccattaaaagaggaccatacctattaaaaaaaaatgtggagttggagggctaacatatttaattaaataaataaataaatctgggtctgcatctcttattaaataaaaatataaaaatatgtacattacattttgcttattttcatataaaaggtaagacagagtttgcaaagcatttgtggctttttgtagtttacttaagccaaaatgtgtttttttccccttgatagcttcgctaatattttaaacagtcctgtaaaaaaccaaaaaggactttttgtatagaaagcactaccctaagccatgaagaactccatgctttgctaaccaagataactgttttctctttgtagaagttttgtttttgaaatgtgtatttctaattatataaaatattaagaatcttttaaaaaaatctgtgaaattaacatgcttgtgtatagctttctaatatatataatattatggtaatagcagaagttttgttatcttaatagcgggaggggggtatatttgtgcagttgcacatttgagtaactattttctttctgttttcttttactctgcttacattttataagtttaaggtcagctgtcaaaaggataacctgtggggttagaacatatcacattgcaacaccctaaattgtttttaatacattagcaatctattgggtcaactgacatccattgtatatactagtttctttcatgctatttttattttgttttttgcatttttatcaaatgcagggcccctttctgatctcaccatttcaccatgcatcttggaattcagtaagtgcatatcctaacttgcccatattctaaatcatctggttggttttcagcctagaatttgatacgctttttagaaatatgcccagaatagaaaagctatgttggggcacatgtcctgcaaatatggccctagaaacaagtgatatggaatttacttggtgaataagttataaattcccacagaagaaaaatgtgaaagactgggtgctagacaagaaggaagcaggtaaagggatagttgctttgtcatccgtttttaattattttaactgacccttgacaatcttgtcagcaatataggactgttgaacaatcccggtgtgtcaggacccccaaatgtcacttctgcataaagcatgtatgtcatctattttttcttcaataaagagatttaatagccatttcaagaaatcccataaagaacctctctatgtccctttttttaatttaaaaaaaatgactcttgtctaatattcgtctataagggattaattttcagaccctttaataagtgagtgccataagaaagtcaatatatattgtttaaaagatatttcagtctaggaaagattttccttctcttggaatgtgaagatctgtcgattcatctccaatcatatgcattgacatacacagcaaagaagatataggcagtaatatcaacactgctatatcatgtgtaggacatttcttatccattttttctcttttacttgcatagttgctatgtgtttctcattgtaaaaggctgccgctgggtggcagaagccaagagaccttattaactaggctatatttttcttaacttgatctgaaatccacaattagaccacaatgcacctttggttgtatccataaaggatgctagcctgccttgtactaatgttttatatattaaaaaaaaaaaatctatcaaccatttcatatatatcccactactcaaggtatccatggaacatgaaagaataacatttatgcagaggaaaaacaaaaacatccctgaaaatatacacactcatacacacacacgcacaggggaataaaataagaaaatcattttcctcaccatagacttgatcccatccttacaacccatccttctaacttgatgtgtataaaatatgcaaacatttcacaaatgttctttgtcatttcaaaatactttagtatatcaatatcagtagataccagtgggtgggaaagggtcattacatgaaaatatgaagaaatagccatattagttttttaacctgcaatttgcctcagcaacaaagaaaaagtgaatttttaatgctgaagataaagtaagctaaagtaccagcagaagccttggctatttatagcagttctgacaatagttttataagaacatgaagagaacagaatcacttgaaaatggatgccagtcatctcttgttcccactactgaattcttataaagtggtggcaagatagggaagggataatctgagaatttttaaaagatgatttaatgagaagaagcacaattttgattttgatgagtcactttctgtaaacaatcttggtctatctttacccttataccttatctgtaatttaccatttattgtatttgcaaagctagtatggtttttaatcacagtaaatcctttgtattccagactttagggcagagccctgagggagtattattttacataacccgtcctagagtaacattttaggcaacattcttcattgcaagtaaaagatccataagtggcattttacacggctgcgagtattgttatatctaatcctattttaaaagatttttggtaatatgaagcttgaatactggtaacagtgatgcaatatacgcaagctgcacaacctgtatattgtatgcattgctgcgtggaggctgtttatttcaacctttttaaaaattgtgttttttagtaaaatggcttattttttcccaaaggtggaatttagcattttgtaatgatgaatataaaaatacctgtcatccccagatcatttaaaagttaactaaagtgagaatgaaaaaacaaaattccaagacactttttaaaagaatgtctgccctcacacacttttatggatttgtttttcttacatacccatcttttaacttagagatagcattttttgccctctttattttgttgtttgtttctccagagagtaaacgctttgtagttctttctttaaaaaacattttttttaaagaagaagaagccacttgaaccctcaataaaggctgttgcctaagcatggcatacttcatctgttctcatttgtgccatctgccgtgatgtcgtcacttttatggcgttaatttcctgccactacagatcttttgaagattgctggaatactggtgtctgttagaatgcttcagactacagatgtaattaaaggcttttcttaatatgttttaaccaaagatgtggagcaatccaagccacatatcttctacatcaaatttttccattttggttattttcataatctggtattgcattttgccttccctgttcatacctcaaattgattcatacctcagtttaattcagagaggtcagttaagtgacggattctgttgtggtttgaatgcagtaccagtgttctcttcgagcaaagtagacctgggtcactgtaggcataggacttggattgcttcagatggtttgctgtatcatttttcttctttttcttttcctggggacttgtttccattaaatgagagtaattaaaatcgcttgtaaatgagggcatacaagcatttgcaacaaatattcaaatagaggctcacagcggcataagctggactttgtcgccactagatgacaagatgttataactaagttaaaccacatctgtgtatctcaagggacttaattcagctgtctgtagtgaataaaagtgggaaattttcaaaagtttctcctgctggaaataaggtataatttgtattttgcagacaattcagtaaagttactggctttcttagtgatgcagtgtccgtggtgcatttttttaaattaatgttttgctgtttaaatttattcaattttattgtgttttttaaaaagcagcttatgccacaagcacaaatgagctttctcagttttcaactcaaaatattatatgaaaagatggatatgtgtgtctgtgtgggaggggtgtgaattggatgacggttcttagggtattacagaattcagccagtggtggaagtctaaggttcttattgaatggttcaacttctttatcaaagaagttccatgaagatctttgataacctgtttaaatgtacagaatttttcaaaagccactgtgaaaagcagtaccataagttattttttaactaaaatctgtagaaagtgtttccaaaagagttccttttttcttcttcgaagtaatttctaaaagttgaaaacataggcttataaatctgaataaattagtgaattcatacattttagagactatcaaatatatccattattaacattcaataataatctctaaaggggaatgtccttaaaaagattgatagaaagattaatttaaaaactgaaaaggaaaacaagacaccaccagttagccagctggagaacttggacttttgcattagtagtgatatctgctccaaaaagaatgcagttcgaggaaatgttgcatgtggcttcaaaatagcagtgctttctgctttgttctcttgtattcattttcagcaaacatgtattaagcaattattatatgtaactcatgtggtgattccaggatgaatgaagttgtagccctttctcttaggaaacttataaactaataggagataaaaggcattctcagggaagtctacaaagtgctatgagggagccactttggccatcctggggcagagcagaccagaggctcagagcatggacacttcctcatccacccagcagaagcctttcacttgattttgaaggtgggcaggattgagaaaggcccagaaggggatgagttcaaagctgtttgtgggcatgtgacccctgcagtcacatatggccctagcttgtgtttcgtttagtgttctgctatcattatcctgataatatcctgataataaaattatccttaataatttta

SEQ ID NO: 465 - DNA, 6952 bp, Homo sapiens
  LGMD-2B; limb girdle dystrophy 2B (Dysferlin)
gtccaagagcgagatctgggctacgccgggcgcccggagccctagtccagcccccggccatcgcggccgccgcccagccaggtgcaaaatgccgtgtcattgggagactccgcagccggagcattagattacagctcgacggagctcgggaagggcggcgggggtggaagatgagcagaagcccctgttctcggaacgccggctgacaagcggggtgagcgcagccggggcggggacccagcctagcccactggagcagccgggggtggcccgttcccctttaagagcaactgctctaagccaggagccagagattcgagccggcctcgcccagccagccctctccagcgaggggacccacaagcggcgcctcggccctcccgacctttccgagccctctttgcgccctgggcgcacggggccctacacgcgccaagcatgctgagggtcttcatcctctatgccgagaacgtccacacacccgacaccgacatcagcgatgcctactgctccgcggtgtttgcaggggtgaagaagagaaccaaagtcatcaagaacagcgtgaaccctgtatggaatgagggatttgaatgggacctcaagggcatccccctggaccagggctctgagcttcatgtggtggtcaaagaccatgagacgatggggaggaacaggttcctgggggaagccaaggtcccactccgagaggtcctcgccacccctagtctgtccgccagcttcaatgcccccctgctggacaccaagaagcagcccacaggggcctcgctggtcctgcaggtgtcctacacaccgctgcctggagctgtgcccctgttcccgccccctactcctctggagccctccccgactctgcctgacctggatgtagtggcagacacaggaggagaggaagacacagaggaccagggactcactggagatgaggcggagccattcctggatcaaagcggaggcccgggggctcccaccaccccaaggaaactaccttcacgtcctccgccccactaccccgggatcaaaagaaagcgaagtgcgcctacatctagaaagctgctgtcagacaaaccgcaggatttccagatcagggtccaggtgatcgaggggcgccagctgccgggggtgaacatcaagcctgtggtcaaggttaccgctgcagggcagaccaagcggacgcggatccacaagggaaacagcccactcttcaatgagactcttttcttcaacttgtttgactctcctggggagctgtttgatgagcccatctttatcacggtggtagactctcgttctctcaggacagatgctctcctcggggagttccggatggacgtgggcaccatttacagagagccccggcacgcctatctcaggaagtggctgctgctctcagaccctgatgacttctctgctggggccagaggctacctgaaaacaagcctttgtgtgctggggcctggggacgaagcgcctctggagagaaaagacccctctgaagacaaggaggacattgaaagcaacctgctccggcccacaggcgtagccctgcgaggagcccacttctgcctgaaggtcttccgggccgaggacttgccgcagatggacgatgccgtgatggacaacgtgaaacagatctttggcttcgagagtaacaagaagaacttggtggacccctttgtggaggtcagctttgcggggaaaatgctgtgcagcaagatcttggagaagacggccaaccctcagtggaaccagaacatcacactgcctgccatgtttccctccatgtgcgaaaaaatgaggattcgtatcatagactgggaccgcctgactcacaatgacatcgtggctaccacctacctgagtatgtcgaaaatctctgcccctggaggagaaatagaagaggagcctgcaggtgctgtcaagccttcgaaagcctcagacttggatgactacctgggcttcctccccacttttgggccctgctacatcaacctctatggcagtcccagagagttcacaggcttcccagacccctacacagagctcaacacaggcaagggggaaggtgtggcttatcgtggccggcttctgctctccctggagaccaagctggtggagcacagtgaacagaaggtggaggaccttcctgcggatgacatcctccgggtggagaagtaccttaggaggcgcaagtactccctgtttgcggccttctactcagccaccatgctgcaggatgtggatgatgccatccagtttgaggtcagcatcgggaactacgggaacaagttcgacatgacctgcctgccgctggcctccaccactcagtacagccgtgcagtctttgacgggtgccactactactacctaccctggggtaacgtgaaacctgtggtggtgctgtcatcctactgggaggacatcagccatagaatcgagactcagaaccagctgcttgggattgctgaccggctggaagctggcctggagcaggtccacctggccctgaaggcgcagtgctccacggaggacgtggactcgctggtggctcagctgacggatgagctcatcgcaggctgcagccagcctctgggtgacatccatgagacaccctctgccacccacctggaccagtacctgtaccagctgcgcacccatcacctgagccaaatcactgaggctgccctggccctgaagctcggccacagtgagctccctgcagctctggagcaggcggaggactggctcctgcgtctgcgtgccctggcagaggagccccagaacagcctgccggacatcgtcatctggatgctgcagggagacaagcgtgtggcataccagcgggtgcccgcccaccaagtcctcttctcccggcggggtgccaactactgtggcaagaattgtgggaagctacagacaatctttctgaaatatccgatggagaaggtgcctggcgcccggatgccagtgcagatacgggtcaagctgtggtttgggctctcagtggatgagaaggagttcaaccagtttgctgaggggaagctgtctgtctttgctgaaacctatgagaacgagactaagttggcccttgttgggaactggggcacaacgggcctcacctaccccaagttttctgacgtcacgggcaagatcaagctacccaaggacagcttccgcccctcggccggctggacctgggctggagattggttcgtgtgtccggagaagactctgctccatgacatggacgccggtcacctgagcttcgtggaagaggtgtttgagaaccagacccggcttcccggaggccagtggatctacatgagtgacaactacaccgatgtgaacggggagaaggtgcttcccaaggatgacattgagtgcccactgggctggaagtgggaagatgaggaatggtccacagacctcaaccgggctgtcgatgagcaaggctgggagtatagcatcaccatccccccggagcggaagccgaagcactgggtccctgctgagaagatgtactacacacaccgacggcggcgctgggtgcgcctgcgcaggagggatctcagccaaatggaagcactgaaaaggcacaggcaggcggaggcggagggcgagggctgggagtacgcctctctttttggctggaagttccacctcgagtaccgcaagacagatgccttccgccgccgccgctggcgccgtcgcatggagccactggagaagacggggcctgcagctgtgtttgcccttgagggggccctgggcggcgtgatggatgacaagagtgaagattccatgtccgtctccaccttgagcttcggtgtgaacagacccacgatttcctgcatattcgactatgggaaccgctaccatctacgctgctacatgtaccaggcccgggacctggctgcgatggacaaggactctttttctgatccctatgccatcgtctccttcctgcaccagagccagaagacggtggtggtgaagaacacccttaaccccacctgggaccagacgctcatcttctacgagatcgagatctttggcgagccggccacagttgctgagcaaccgcccagcattgtggtggagctgtacgaccatgacacttatggtgcagacgagtttatgggtcgctgcatctgtcaaccgagtctggaacggatgccacggctggcctggttcccactgacgaggggcagccagccgtcgggggagctgctggcctcttttgagctcatccagagagagaagccggccatccaccatattcctggttttgaggtgcaggagacatcaaggatcctggatgagtctgaggacacagacctgccctacccaccaccccagagggaggccaacatctacatggttcctcagaacatcaagccagcgctccagcgtaccgccatcgagatcctggcatggggcctgcggaacatgaagagttaccagctggccaacatctcctcccccagcctcgtggtagagtgtgggggccagacggtgcagtcctgtgtcatcaggaacctccggaagaaccccaactttgacatctgcaccctcttcatggaagtgatgctgcccagggaggagctctactgcccccccatcaccgtcaaggtcatcgataaccgccagtttggccgccggcctgtggtgggccagtgtaccatccgctccctggagagcttcctgtgtgacccctactcggcggagagtccatccccacagggtggcccagacgatgtgagcctactcagtcctggggaagacgtgctcatcgacattgatgacaaggagcccctcatccccatccaggaggaagagttcatcgattggtggagcaaattctttgcctccataggggagagggaaaagtgcggctcctacctggagaaggattttgacaccctgaaggtctatgacacacagctggagaatgtggaggcctttgagggcctgtctgacttttgtaacaccttcaagctgtaccggggcaagacgcaggaggagacagaagatccatctgtgattggtgaatttaagggcctcttcaaaatttatcccctcccagaagacccagccatccccatgcccccaagacagttccaccagctggccgcccagggaccccaggagtgcttggtccgtatctacattgtccgagcatttggcctgcagcccaaggaccccaatggaaagtgtgatccttacatcaagatctccatagggaagaaatcagtgagtgaccaggataactacatcccctgcacgctggagcccgtatttggaaagatgttcgagctgacctgcactctgcctctggagaaggacctaaagatcactctctatgactatgacctcctctccaaggacgaaaagatcggtgagacggtcgtcgacctggagaacaggctgctgtccaagtttggggctcgctgtggactcccacagacctactgtgtctctggaccgaaccagtggcgggaccagctccgcccctcccagctcctccacctcttctgccagcagcatagagtcaaggcacctgtgtaccggacagaccgtgtaatgtttcaggataaagaatattccattgaagagatagaggctggcaggatcccaaacccacacctgggcccagtggaggagcgtctggctctgcatgtgcttcagcagcagggcctggtcccggagcacgtggagtcacggcccctctacagccccctgcagccagacatcgagcaggggaagctgcagatgtgggtcgacctatttccgaaggccctggggcggcctggacctcccttcaacatcaccccacggagagccagaaggtttttcctgcgttgtattatctggaataccagagatgtgatcctggatgacctgagcctcacgggggagaagatgagcgacatttatgtgaaaggttggatgattggctttgaagaacacaagcaaaagacagacgtgcattatcgttccctgggaggtgaaggcaacttcaactggaggttcattttccccttcgactacctgccagctgagcaagtctgtaccattgccaagaaggatgccttctggaggctggacaagactgagagcaaaatcccagcacgagtggtgttccagatctgggacaatgacaagttctcctttgatgattttctgggctccctgcagctcgatctcaaccgcatgcccaagccagccaagacagccaagaagtgctccttggaccagctggatgatgctttccacccagaatggtttgtgtccctttttgagcagaaaacagtgaagggctggtggccctgtgtagcagaagagggtgagaagaaaatactggcgggcaagctggaaatgaccttggagattgtagcagagagtgagcatgaggagcggcctgctggccagggccgggatgagcccaacatgaaccctaagcttgaggacccaaggcgccccgacacctccttcctgtggtttacctccccatacaagaccatgaagttcatcctgtggcggcgtttccggtgggccatcatcctcttcatcatcctcttcatcctgctgctgttcctggccatcttcatctacgccttcccgaactatgctgccatgaagctggtgaagcccttcagctgaggactctcctgccctgtagaaggggccgtggggtcccctccagcatgggactggcctgcctcctccgcccagctcggcgagctcctccagacctcctaggcctgattgtcctgccagggtgggcagacagacagatggaccggcccacactcccagagttgctaacatggagctctgagatcaccccacttccatcatttccttctcccccaacccaacgcttttttggatcagctcagacatatttcagtataaaacagttggaaccaca

SEQ ID NO: 466 - DNA, 13992 bp, Homo sapiens
  Dystrophin (DMD)
atcagttactgtgttgactcactcagtgttgggatcactcactttccccctacaggactcagatctgggaggcaattaccttcggagaaaaacgaataggaaaaactgaagtgttactttttttaaagctgctgaagtttgttggtttctcattgtttttaagcctactggagcaataaagtttgaagaacttttaccaggttttttttatcgctgccttgatatacacttttcaaaatgctttggtgggaagaagtagaggactgttatgaaagagaagatgttcaaaagaaaacattcacaaaatgggtaaatgcacaattttctaagtttgggaagcagcatattgagaacctcttcagtgacctacaggatgggaggcgcctcctagacctcctcgaaggcctgacagggcaaaaactgccaaaagaaaaaggatccacaagagttcatgccctgaacaatgtcaacaaggcactgcgggttttgcagaacaataatgttgatttagtgaatattggaagtactgacatcgtagatggaaatcataaactgactcttggtttgatttggaatataatcctccactggcaggtcaaaaatgtaatgaaaaatatcatggctggattgcaacaaaccaacagtgaaaagattctcctgagctgggtccgacaatcaactcgtaattatccacaggttaatgtaatcaacttcaccaccagctggtctgatggcctggctttgaatgctctcatccatagtcataggccagacctatttgactggaatagtgtggtttgccagcagtcagccacacaacgactggaacatgcattcaacatcgccagatatcaattaggcatagagaaactactcgatcctgaagatgttgataccacctatccagataagaagtccatcttaatgtacatcacatcactcttccaagttttgcctcaacaagtgagcattgaagccatccaggaagtggaaatgttgccaaggccacctaaagtgactaaagaagaacattttcagttacatcatcaaatgcactattctcaacagatcacggtcagtctagcacagggatatgagagaacttcttcccctaagcctcgattcaagagctatgcctacacacaggctgcttatgtcaccacctctgaccctacacggagcccatttccttcacagcatttggaagctcctgaagacaagtcatttggcagttcattgatggagagtgaagtaaacctggaccgttatcaaacagctttagaagaagtattatcgtggcttctttctgctgaggacacattgcaagcacaaggagagatttctaatgatgtggaagtggtgaaagaccagtttcatactcatgaggggtacatgatggatttgacagcccatcagggccgggttggtaatattctacaattgggaagtaagctgattggaacaggaaaattatcagaagatgaagaaactgaagtacaagagcagatgaatctcctaaattcaagatgggaatgcctcagggtagctagcatggaaaaacaaagcaatttacatagagttttaatggatctccagaatcagaaactgaaagagttgaatgactggctaacaaaaacagaagaaagaacaaggaaaatggaggaagagcctcttggacctgatcttgaagacctaaaacgccaagtacaacaacataaggtgcttcaagaagatctagaacaagaacaagtcagggtcaattctctcactcacatggtggtggtagttgatgaatctagtggagatcacgcaactgctgctttggaagaacaacttaaggtattgggagatcgatgggcaaacatctgtagatggacagaagaccgctgggttcttttacaagacatccttctcaaatggcaacgtcttactgaagaacagtgcctttttagtgcatggctttcagaaaaagaagatgcagtgaacaagattcacacaactggctttaaagatcaaaatgaaatgttatcaagtcttcaaaaactggccgttttaaaagcggatctagaaaagaaaaagcaatccatgggcaaactgtattcactcaaacaagatcttctttcaacactgaagaataagtcagtgacccagaagacggaagcatggctggataactttgcccggtgttgggataatttagtccaaaaacttgaaaagagtacagcacagatttcacaggctgtcaccaccactcagccatcactaacacagacaactgtaatggaaacagtaactacggtgaccacaagggaacagatcctggtaaagcatgctcaagaggaacttccaccaccacctccccaaaagaagaggcagattactgtggattctgaaattaggaaaaggttggatgttgatataactgaacttcacagctggattactcgctcagaagctgtgttgcagagtcctgaatttgcaatctttcggaaggaaggcaacttctcagacttaaaagaaaaagtcaatgccatagagcgagaaaaagctgagaagttcagaaaactgcaagatgccagcagatcagctcaggccctggtggaacagatggtgaatgagggtgttaatgcagatagcatcaaacaagcctcagaacaactgaacagccggtggatcgaattctgccagttgctaagtgagagacttaactggctggagtatcagaacaacatcatcgctttctataatcagctacaacaattggagcagatgacaactactgctgaaaactggttgaaaatccaacccaccaccccatcagagccaacagcaattaaaagtcagttaaaaatttgtaaggatgaagtcaaccggctatcagatcttcaacctcaaattgaacgattaaaaattcaaagcatagccctgaaagagaaaggacaaggacccatgttcctggatgcagactttgtggcctttacaaatcattttaagcaagtcttttctgatgtgcaggccagagagaaagagctacagacaatttttgacactttgccaccaatgcgctatcaggagaccatgagtgccatcaggacatgggtccagcagtcagaaaccaaactctccatacctcaacttagtgtcaccgactatgaaatcatggagcagagactcggggaattgcaggctttacaaagttctctgcaagagcaacaaagtggcctatactatctcagcaccactgtgaaagagatgtcgaagaaagcgccctctgaaattagccggaaatatcaatcagaatttgaagaaattgagggacgctggaagaagctctcctcccagctggttgagcattgtcaaaagctagaggagcaaatgaataaactccgaaaaattcagaatcacatacaaaccctgaagaaatggatggctgaagttgatgtttttctgaaggaggaatggcctgcccttggggattcagaaattctaaaaaagcagctgaaacagtgcagacttttagtcagtgatattcagacaattcagcccagtctaaacagtgtcaatgaaggtgggcagaagataaagaatgaagcagagccagagtttgcttcgagacttgagacagaactcaaagaacttaacactcagtgggatcacatgtgccaacaggtctatgccagaaaggaggccttgaagggaggtttggagaaaactgtaagcctccagaaagatctatcagagatgcacgaatggatgacacaagctgaagaagagtatcttgagagagattttgaatataaaactccagatgaattacagaaagcagttgaagagatgaagagagctaaagaagaggcccaacaaaaagaagcgaaagtgaaactccttactgagtctgtaaatagtgtcatagctcaagctccacctgtagcacaagaggccttaaaaaaggaacttgaaactctaaccaccaactaccagtggctctgcactaggctgaatgggaaatgcaagactttggaagaagtttgggcatgttggcatgagttattgtcatacttggagaaagcaaacaagtggctaaatgaagtagaatttaaacttaaaaccactgaaaacattcctggcggagctgaggaaatctctgaggtgctagattcacttgaaaatttgatgcgacattcagaggataacccaaatcagattcgcatattggcacagaccctaacagatggcggagtcatggatgagctaatcaatgaggaacttgagacatttaattctcgttggagggaactacatgaagaggctgtaaggaggcaaaagttgcttgaacagagcatccagtctgcccaggagactgaaaaatccttacacttaatccaggagtccctcacattcattgacaagcagttggcagcttatattgcagacaaggtggacgcagctcaaatgcctcaggaagcccagaaaatccaatctgatttgacaagtcatgagatcagtttagaagaaatgaagaaacataatcaggggaaggaggctgcccaaagagtcctgtctcagattgatgttgcacagaaaaaattacaagatgtctccatgaagtttcgattattccagaaaccagccaattttgagcagcgtctacaagaaagtaagatgattttagatgaagtgaagatgcacttgcctgcattggaaacaaagagtgtggaacaggaagtagtacagtcacagctaaatcattgtgtgaacttgtataaaagtctgagtgaagtgaagtctgaagtggaaatggtgataaagactggacgtcagattgtacagaaaaagcagacggaaaatcccaaagaacttgatgaaagagtaacagctttgaaattgcattataatgagctgggagcaaaggtaacagaaagaaagcaacagttggagaaatgcttgaaattgtcccgtaagatgcgaaaggaaatgaatgtcttgacagaatggctggcagctacagatatggaattgacaaagagatcagcagttgaaggaatgcctagtaatttggattctgaagttgcctggggaaaggctactcaaaaagagattgagaaacagaaggtgcacctgaagagtatcacagaggtaggagaggccttgaaaacagttttgggcaagaaggagacgttggtggaagataaactcagtcttctgaatagtaactggatagctgtcacctcccgagcagaagagtggttaaatcttttgttggaataccagaaacacatggaaacttttgaccagaatgtggaccacatcacaaagtggatcattcaggctgacacacttttggatgaatcagagaaaaagaaaccccagcaaaaagaagacgtgcttaagcgtttaaaggcagaactgaatgacatacgcccaaaggtggactctacacgtgaccaagcagcaaacttgatggcaaaccgcggtgaccactgcaggaaattagtagagccccaaatctcagagctcaaccatcgatttgcagccatttcacacagaattaagactggaaaggcctccattcctttgaaggaattggagcagtttaactcagatatacaaaaattgcttgaaccactggaggctgaaattcagcagggggtgaatctgaaagaggaagacttcaataaagatatgaatgaagacaatgagggtactgtaaaagaattgttgcaaagaggagacaacttacaacaaagaatcacagatgagagaaagcgagaggaaataaagataaaacagcagctgttacagacaaaacataatgctctcaaggatttgaggtctcaaagaagaaaaaaggctctagaaatttctcatcagtggtatcagtacaagaggcaggctgatgatctcctgaaatgcttggatgacattgaaaaaaaattagccagcctacctgagcccagagatgaaaggaaaataaaggaaattgatcgggaattgcagaagaagaaagaggagctgaatgcagtgcgtaggcaagctgagggcttgtctgaggatggggccgcaatggcagtggagccaactcagatccagctcagcaagcgctggcgggaaattgagagcaaatttgctcagtttcgaagactcaactttgcacaaattcacactgtccgtgaagaaacgatgatggtgatgactgaagacatgcctttggaaatttcttatgtgccttctacttatttgactgaaatcactcatgtctcacaagccctattagaagtggaacaacttctcaatgctcctgacctctgtgctaaggactttgaagatctctttaagcaagaggagtctctgaagaatataaaagatagtctacaacaaagctcaggtcggattgacattattcatagcaagaagacagcagcattgcaaagtgcaacgcctgtggaaagggtgaagctacaggaagctctctcccagcttgatttccaatgggaaaaagttaacaaaatgtacaaggaccgacaagggcgatttgacagatctgttgagaaatggcggcgttttcattatgatataaagatatttaatcagtggctaacagaagctgaacagtttctcagaaagacacaaattcctgagaattgggaacatgctaaatacaaatggtatcttaaggaactccaggatggcattgggcagcggcaaactgttgtcagaacattgaatgcaactggggaagaaataattcagcaatcctcaaaaacagatgccagtattctacaggaaaaattgggaagcctgaatctgcggtggcaggaggtctgcaaacagctgtcagacagaaaaaagaggctagaagaacaaaagaatatcttgtcagaatttcaaagagatttaaatgaatttgttttatggttggaggaagcagataacattgctagtatcccacttgaacctggaaaagagcagcaactaaaagaaaagcttgagcaagtcaagttactggtggaagagttgcccctgcgccagggaattctcaaacaattaaatgaaactggaggacccgtgcttgtaagtgctcccataagcccagaagagcaagataaacttgaaaataagctcaagcagacaaatctccagtggataaaggtttccagagctttacctgagaaacaaggagaaattgaagctcaaataaaagaccttgggcagcttgaaaaaaagcttgaagaccttgaagagcagttaaatcatctgctgctgtggttatctcctattaggaatcagttggaaatttataaccaaccaaaccaagaaggaccatttgacgttaaggaaactgaaatagcagttcaagctaaacaaccggatgtggaagagattttgtctaaagggcagcatttgtacaaggaaaaaccagccactcagccagtgaagaggaagttagaagatctgagctctgagtggaaggcggtaaaccgtttacttcaagagctgagggcaaagcagcctgacctagctcctggactgaccactattggagcctctcctactcagactgttactctggtgacacaacctgtggttactaaggaaactgccatctccaaactagaaatgccatcttccttgatgttggaggtacctgctctggcagatttcaaccgggcttggacagaacttaccgactggctttctctgcttgatcaagttataaaatcacagagggtgatggtgggtgaccttgaggatatcaacgagatgatcatcaagcagaaggcaacaatgcaggatttggaacagaggcgtccccagttggaagaactcattaccgctgcccaaaatttgaaaaacaagaccagcaatcaagaggctagaacaatcattacggatcgaattgaaagaattcagaatcagtgggatgaagtacaagaacaccttcagaaccggaggcaacagttgaatgaaatgttaaaggattcaacacaatggctggaagctaaggaagaagctgagcaggtcttaggacaggccagagccaagcttgagtcatggaaggagggtccctatacagtagatgcaatccaaaagaaaatcacagaaaccaagcagttggccaaagacctccgccagtggcagacaaatgtagatgtggcaaatgacttggccctgaaacttctccgggattattctgcagatgataccagaaaagtccacatgataacagagaatatcaatgcctcttggagaagcattcataaaagggtgagtgagcgagaggctgctttggaagaaactcatagattactgcaacagttccccctggacctggaaaagtttcttgcctggcttacagaagctgaaacaactgccaatgtcctacaggatgctacccgtaaggaaaggctcctagaagactccaagggagtaaaagagctgatgaaacaatggcaagacctccaaggtgaaattgaagctcacacagatgtttatcacaacctggatgaaaacagccaaaaaatcctgagatccctggaaggttccgatgatgcagtcctgttacaaagacgtttggataacatgaacttcaagtggagtgaacttcggaaaaagtctctcaacattaggtcccatttggaagccagttctgaccagtggaagcgtctgcacctttctctgcaggaacttctggtgtggctacagctgaaagatgatgaattaagccggcaggcacctattggaggcgactttccagcagttcagaagcagaacgatgtacatagggccttcaagagggaattgaaaactaaagaacctgtaatcatgagtactcttgagactgtacgaatatttctgacagagcagcctttggaaggactagagaaactctaccaggagcccagagagctgcctcctgaggagagagcccagaatgtcactcggcttctacgaaagcaggctgaggaggtcaatactgagtgggaaaaattgaacctgcactccgctgactggcagagaaaaatagatgagacccttgaaagactccgggaacttcaagaggccacggatgagctggacctcaagctgcgccaagctgaggtgatcaagggatcctggcagcccgtgggcgatctcctcattgactctctccaagatcacctcgagaaagtcaaggcacttcgaggagaaattgcgcctctgaaagagaacgtgagccacgtcaatgaccttgctcgccagcttaccactttgggcattcagctctcaccgtataacctcagcactctggaagacctgaacaccagatggaagcttctgcaggtggccgtcgaggaccgagtcaggcagctgcatgaagcccacagggactttggtccagcatctcagcactttctttccacgtctgtccagggtccctgggagagagccatctcgccaaacaaagtgccctactatatcaaccacgagactcaaacaacttgctgggaccatcccaaaatgacagagctctaccagtctttagctgacctgaataatgtcagattctcagcttataggactgccatgaaactccgaagactgcagaaggccctttgcttggatctcttgagcctgtcagctgcatgtgatgccttggaccagcacaacctcaagcaaaatgaccagcccatggatatcctgcagattattaattgtttgaccactatttatgaccgcctggagcaagagcacaacaatttggtcaacgtccctctctgcgtggatatgtgtctgaactggctgctgaatgtttatgatacgggacgaacagggaggatccgtgtcctgtcttttaaaactggcatcatttccctgtgtaaagcacatttggaagacaagtacagataccttttcaagcaagtggcaagttcaacaggattttgtgaccagcgcaggctgggcctccttctgcatgattctatccaaattccaagacagttgggtgaagttgcatcctttgggggcagtaacattgagccaagtgtccggagctgcttccaatttgctaataataagccagagatcgaagcggccctcttcctagactggatgagactggaaccccagtccatggtgtggctgcccgtcctgcacagagtggctgctgcagaaactgccaagcatcaggccaaatgtaacatctgcaaagagtgtccaatcattggattcaggtacaggagtctaaagcactttaattatgacatctgccaaagctgctttttttctggtcgagttgcaaaaggccataaaatgcactatcccatggtggaatattgcactccgactacatcaggagaagatgttcgagactttgccaaggtactaaaaaacaaatttcgaaccaaaaggtattttgcgaagcatccccgaatgggctacctgccagtgcagactgtcttagagggggacaacatggaaactcccgttactctgatcaacttctggccagtagattctgcgcctgcctcgtcccctcagctttcacacgatgatactcattcacgcattgaacattatgctagcaggctagcagaaatggaaaacagcaatggatcttatctaaatgatagcatctctcctaatgagagcatagatgatgaacatttgttaatccagcattactgccaaagtttgaaccaggactcccccctgagccagcctcgtagtcctgcccagatcttgatttccttagagagtgaggaaagaggggagctagagagaatcctagcagatcttgaggaagaaaacaggaatctgcaagcagaatatgaccgtctaaagcagcagcacgaacataaaggcctgtccccactgccgtcccctcctgaaatgatgcccacctctccccagagtccccgggatgctgagctcattgctgaggccaagctactgcgtcaacacaaaggccgcctggaagccaggatgcaaatcctggaagaccacaataaacagctggagtcacagttacacaggctaaggcagctgctggagcaaccccaggcagaggccaaagtgaatggcacaacggtgtcctctccttctacctctctacagaggtccgacagcagtcagcctatgctgctccgagtggttggcagtcaaacttcggactccatgggtgaggaagatcttctcagtcctccccaggacacaagcacagggttagaggaggtgatggagcaactcaacaactccttccctagttcaagaggaagaaatacccctggaaagccaatgagagaggacacaatgtaggaagtcttttccacatggcagatgatttgggcagagcgatggagtccttagtatcagtcatgacagatgaagaaggagcagaataaatgttttacaactcctgattcccgcatggtttttataatattcatacaacaaagaggattagacagtaagagtttacaagaaataaatctatatttttgtgaagggtagtggtattatactgtagatttcagtagtttctaagtctgttattgttttgttaacaatggcaggttttacacgtctatgcaattgtacaaaaaagttataagaaaactacatgtaaaatcttgatagctaaataacttgccatttctttatatggaacgcattttgggttgtttaaaaatttataacagttataaagaaagattgtaaactaaagtgtgctttataaaaaaaagttgtttataaaaacccctaaaaacaaaacaaacacacacacacacacatacacacacacacacaaaactttgaggcagcgcattgttttgcatccttttggcgtgatatccatatgaaattcatggctttttctttttttgcatattaaagataagacttcctctaccaccacaccaaatgactactacacactgctcatttgagaactgtcagctgagtggggcaggcttgagttttcatttcatatatctatatgtctataagtatataaatactatagttatatagataaagagatacgaatttctatagactgactttttccattttttaaatgttcatgtcacatcctaatagaaagaaattacttctagtcagtcatccaggcttacctgcttggtctagaatggatttttcccggagccggaagccaggaggaaactacaccacactaaaacattgtctacagctccagatgtttctcattttaaacaactttccactgacaacgaaagtaaagtaaagtattggatttttttaaagggaacatgtgaatgaatacacaggacttattatatcagagtgagtaatcggttggttggttgattgattgattgattgatacattcagcttcctgctgctagcaatgccacgatttagatttaatgatgcttcagtggaaatcaatcagaaggtattctgaccttgtgaacatcagaaggtattttttaactcccaagcagtagcaggacgatgatagggctggagggctatggattcccagcccatccctgtgaaggagtaggccactctttaagtgaaggattggatgattgttcataatacataaagttctctgtaattacaactaaattattatgccctcttctcacagtcaaaaggaactgggtggtttggtttttgttgcttttttagatttattgtcccatgtgggatgagtttttaaatgccacaagacataatttaaaataaataaactttgggaaaaggtgtaaaacagtagccccatcacatttgtgatactgacaggtatcaacccagaagcccatgaactgtgtttccatcctttgcatttctctgcgagtagttccacacaggtttgtaagtaagtaagaaagaaggcaaattgattcaaatgttacaaaaaaacccttcttggtggattagacaggttaaatatataaacaaacaaacaaaaattgctcaaaaaagaggagaaaagctcaagaggaaaagctaaggactggtaggaaaaagctttactctttcatgccattttatttctttttgatttttaaatcattcattcaatagataccaccgtgtgacctataattttgcaaatctgttacctctgacatcaagtgtaattagcttttggagagtgggctgacatcaagtgtaattagcttttggagagtgggttttgtccattattaataattaattaattaacatcaaacacggcttctcatgctatttctacctcactttggttttggggtgttcctgataattgtgcacacctgagttcacagcttcaccacttgtccattgcgttattttctttttcctttataattctttctttttccttcataattttcaaaagaaaacccaaagctctaaggtaacaaattaccaaattacatgaagatttggtttttgtcttgcatttttttcctttatgtgacgctggaccttttctttacccaaggatttttaaaactcagatttaaaacaaggggttactttacatcctactaagaagtttaagtaagtaagtttcattctaaaatcagaggtaaatagagtgcataaataattttgttttaatctttttgtttttcttttagacacattagctctggagtgagtctgtcataatatttgaacaaaaattgagagctttattgctgcattttaagcataattaatttggacattatttcgtgttgtgttctttataaccaccaagtattaaactgtaaatcataatgtaactgaagcataaacatcacatggcatgttttgtcattgttttcaggtactgagttcttacttgagtatcataatatattgtgttttaacaccaacactgtaacatttacgaattatttttttaaacttcagttttactgcattttcacaacatatcagacttcaccaaatatatgccttactattgtattatagtactgctttactgtgtatctcaataaagcacgcagttatgttacaaaaaa

SEQ ID NO: 467 - DNA, 1281 bp, Homo sapiens
  Emerin (EMD)
agcctgcggagccagcggccgtgacgcgacaacgattcggctgtgacgcgacaacgattcggctgtgacgcgagcgcggccgctcccgatgcgctcgtgccgcccccgccgtgctcctcggcagccgttgctcggccggttttggtaggcccgggccgccgccaggcctccgcctgagcccgcacccgccatggacaactacgcagatctttcggataccgagctgaccaccttgctgcgccggtacaacatcccgcacgggcctgtagtaggatcaactcgtaggctttacgagaagaagatcttcgagtacgagacccagaggcggcggctctcgccccccagctcgtccgccgcctcctcttatagcttctctgacttgaattcgactagaggggatgcagatatgtatgatcttcccaagaaagaggacgctttactctaccagagcaagggctacaatgacgactactatgaagagagctacttcaccaccaggacttatggggagcccgagtctgccggcccgtccagggctgtccgccagtcagtgacttcattcccagatgctgacgctttccatcaccaggtgcatgatgacgatcttttgtcttcttctgaagaggagtgcaaggatagggaacgccccatgtacggccgggacagtgcctaccagagcatcacgcactaccgccctgtttcagcctccaggagctccctggacctgtcctattatcctacttcctcctccacctcttttatgtcctcctcatcatcttcctcttcatggctcacccgccgtgccatccggcctgaaaaccgtgctcctggggctgggctgggccaggatcgccaggtcccgctctggggccagctgctgcttttcctggtctttgtgatcgtcctcttcttcatttaccacttcatgcaggctgaagaaggcaaccccttctagagggagccatgagggtctgggcttcagagctaggtctttggggaagtcctggctgactgccttagcagtgggggtgggggtgggggcaggggcaggggctttatgtgtttttgcttggggggcgctgggcctagcccagagtagtgcttgctccccctgccttgtcccaccagggaggcagcagactcaggccctccatggtcctctttgtcattttgttgacatgcattcctccttttgtcatcttgttggggggaggggattaaccaaaggccaccctgactttgtttttgtggacacacaataaaagccccgtttatttgtaa

SEQ ID NO: 468 - DNA, 3178 bp, Homo sapiens
  Lamin A/C
agtgttcgcgggagcgccgcacctacaccagccaacccagatcccgaggtccgacagcgcccggcccagatccccacgcctgccaggagcaagccgagagccagccggccggcgcactccgactccgagcagtctctgtccttcgacccgagccccgcgccctttccgggacccctgccccgcgggcagcgctgccaacctgccggccatggagaccccgtcccagcggcgcgccacccgcagcggggcgcaggccagctccactccgctgtcgcccacccgcatcacccggctgcaggagaaggaggacctgcaggagctcaatgatcgcttggcggtctacatcgaccgtgtgcgctcgctggaaacggagaacgcagggctgcgccttcgcatcaccgagtctgaagaggtggtcagccgcgaggtgtccggcatcaaggccgcctacgaggccgagctcggggatgcccgcaagacccttgactcagtagccaaggagcgcgcccgcctgcagctggagctgagcaaagtgcgtgaggagtttaaggagctgaaagcgcgcaataccaagaaggagggtgacctgatagctgctcaggctcggctgaaggacctggaggctctgctgaactccaaggaggccgcactgagcactgctctcagtgagaagcgcacgctggagggcgagctgcatgatctgcggggccaggtggccaagcttgaggcagccctaggtgaggccaagaagcaacttcaggatgagatgctgcggcgggtggatgctgagaacaggctgcagaccatgaaggaggaactggacttccagaagaacatctacagtgaggagctgcgtgagaccaagcgccgtcatgagacccgactggtggagattgacaatgggaagcagcgtgagtttgagagccggctggcggatgcgctgcaggaactgcgggcccagcatgaggaccaggtggagcagtataagaaggagctggagaagacttattctgccaagctggacaatgccaggcagtctgctgagaggaacagcaacctggtgggggctgcccacgaggagctgcagcagtcgcgcatccgcatcgacagcctctctgcccagctcagccagctccagaagcagctggcagccaaggaggcgaagcttcgagacctggaggactcactggcccgtgagcgggacaccagccggcggctgctggcggaaaaggagcgggagatggccgagatgcgggcaaggatgcagcagcagctggacgagtaccaggagcttctggacatcaagctggccctggacatggagatccacgcctaccgcaagctcttggagggcgaggaggagaggctacgcctgtcccccagccctacctcgcagcgcagccgtggccgtgcttcctctcactcatcccagacacagggtgggggcagcgtcaccaaaaagcgcaaactggagtccactgagagccgcagcagcttctcacagcacgcacgcactagcgggcgcgtggccgtggaggaggtggatgaggagggcaagtttgtccggctgcgcaacaagtccaatgaggaccagtccatgggcaattggcagatcaagcgccagaatggagatgatcccttgctgacttaccggttcccaccaaagttcaccctgaaggctgggcaggtggtgacgatctgggctgcaggagctggggccacccacagcccccctaccgacctggtgtggaaggcacagaacacctggggctgcgggaacagcctgcgtacggctctcatcaactccactggggaagaagtggccatgcgcaagctggtgcgctcagtgactgtggttgaggacgacgaggatgaggatggagatgacctgctccatcaccaccacggctcccactgcagcagctcgggggaccccgctgagtacaacctgcgctcgcgcaccgtgctgtgcgggacctgcgggcagcctgccgacaaggcatctgccagcggctcaggagcccaggtgggcggacccatctcctctggctcttctgcctccagtgtcacggtcactcgcagctaccgcagtgtggggggcagtgggggtggcagcttcggggacaatctggtcacccgctcctacctcctgggcaactccagcccccgaacccagagcccccagaactgcagcatcatgtaatctgggacctgccaggcaggggtgggggtggaggcttcctgcgtcctcctcacctcatgcccaccccctgccctgcacgtcatgggagggggcttgaagccaaagaaaaataaccctttggtttttttcttctgtatttttttttctaagagaagttattttctacagtggttttatactgaaggaaaaacacaagcaaaaaaaaaaaaaagcatctatctcatctatctcaatcctaatttctcctcccttccttttccctgcttccaggaaactccacatctgccttaaaaccaaagagggcttcctctagaagccaagggaaaggggtgcttttatagaggctagcttctgcttttctgccctggctgctgcccccaccccggggaccctgtgacatggtgcctgagaggcaggcatagaggcttctccgccagcctcctctggacggcaggctcactgccaggccagcctccgagagggagagagagagagagaggacagcttgagccgggcccctgggcttggcctgctgtgattccactacacctggctgaggttcctctgcctgccccgcccccagtccccacccctgcccccagccccggggtgagtccattctcccaggtaccagctgcgcttgcttttctgtattttatttagacaagagatgggaatgaggtgggaggtggaagaagggagaagaaaggtgagtttgagctgccttccctagctttagaccctgggtgggctctgtgcagtcactggaggttgaagccaagtggggtgctgggaggagggagagggaggtcactggaaaggggagagcctgctggcacccaccgtggaggaggaaggcaagagggggtggaggggtgtggcagtggttttggcaaacgctaaagagcccttgcctccccatttcccatctgcaccccttctctcctccccaaatcaatacactagttgtttcta

SEQ ID NO: 469 - DNA, 3142 bp, Homo sapiens
  alpha-1 anti-trypsin (A1AT)
agagtcctgagctgaaccaagaaggaggagggggtcgggcctccgaggaaggcctagccgctgctgctgccaggaattccaggttggaggggcggcaacctcctgccagccttcaggccactctcctgtgcctgccagaagagacagagcttgaggagagcttgaggagagcaggaaaggacaatgccgtcttctgtctcgtggggcatcctcctgctggcaggcctgtgctgcctggtccctgtctccctggctgaggatccccagggagatgctgcccagaagacagatacatcccaccatgatcaggatcacccaaccttcaacaagatcacccccaacctggctgagttcgccttcagcctataccgccagctggcacaccagtccaacagcaccaatatcttcttctccccagtgagcatcgctacagcctttgcaatgctctccctggggaccaaggctgacactcacgatgaaatcctggagggcctgaatttcaacctcacggagattccggaggctcagatccatgaaggcttccaggaactcctccgtaccctcaaccagccagacagccagctccagctgaccaccggcaatggcctgttcctcagcgagggcctgaagctagtggataagtttttggaggatgttaaaaagttgtaccactcagaagccttcactgtcaacttcggggacaccgaagaggccaagaaacagatcaacgattacgtggagaagggtactcaagggaaaattgtggatttggtcaaggagcttgacagagacacagtttttgctctggtgaattacatcttctttaaaggcaaatgggagagaccctttgaagtcaaggacaccgaggaagaggacttccacgtggaccaggtgaccaccgtgaaggtgcctatgatgaagcgtttaggcatgtttaacatccagcactgtaagaagctgtccagctgggtgctgctgatgaaatacctgggcaatgccaccgccatcttcttcctgcctgatgaggggaaactacagcacctggaaaatgaactcacccacgatatcatcaccaagttcctggaaaatgaagacagaaggtctgccagcttacatttacccaaactgtccattactggaacctatgatctgaagagcgtcctgggtcaactgggcatcactaaggtcttcagcaatggggctgacctctccggggtcacagaggaggcacccctgaagctctccaaggccgtgcataaggctgtgctgaccatcgacgagaaagggactgaagctgctggggccatgtttttagaggccatacccatgtctatcccccccgaggtcaagttcaacaaaccctttgtcttcttaatgattgaacaaaataccaagtctcccctcttcatgggaaaagtggtgaatcccacccaaaaataactgcctctcgctcctcaacccctcccctccatccctggccccctccctggatgacattaaagaagggttgagctggtccctgcctgcatgtgactgtaaatccctcccatgttttctctgagtctccctttgcctgctgaggctgtatgtgggctccaggtaacagtgctgtcttcgggccccctgaactgtgttcatggagcatctggctgggtaggcacatgctgggcttgaatccaggggggactgaatcctcagcttacggacctgggcccatctgtttctggagggctccagtcttccttgtcctgtcttggagtccccaagaaggaatcacaggggaggaaccagataccagccatgaccccaggctccaccaagcatcttcatgtccccctgctcatcccccactcccccccacccagagttgctcatcctgccagggctggctgtgcccaccccaaggctgccctcctgggggccccagaactgcctgatcgtgccgtggcccagttttgtggcatctgcagcaacacaagagagaggacaatgtcctcctcttgacccgctgtcacctaaccagactcgggccctgcacctctcaggcacttctggaaaatgactgaggcagattcttcctgaagcccattctccatggggcaacaaggacacctattctgtccttgtccttccatcgctgccccagaaagcctcacatatctccgtttagaatcaggtcccttctccccagatgaagaggagggtctctgctttgttttctctatctcctcctcagacttgaccaggcccagcaggccccagaagaccattaccctatatcccttctcctccctagtcacatggccataggcctgctgatggctcaggaaggccattgcaaggactcctcagctatgggagaggaagcacatcacccattgacccccgcaacccctccctttcctcctctgagtcccgactggggccacatgcagcctgacttctttgtgcctgttgctgtccctgcagtcttcagagggccaccgcagctccagtgccacggcaggaggctgttcctgaatagcccctgtggtaagggccaggagagtccttccatcctccaaggccctgctaaaggacacagcagccaggaagtcccctgggcccctagctgaaggacagcctgctccctccgtctctaccaggaatggccttgtcctatggaaggcactgccccatcccaaactaatctaggaatcactgtctaaccactcactgtcatgaatgtgtacttaaaggatgaggttgagtcataccaaatagtgatttcgatagttcaaaatggtgaaattagcaattctacatgattcagtctaatcaatggataccgactgtttcccacacaagtctcctgttctcttaagcttactcactgacagcctttcactctccacaaatacattaaagatatggccatcaccaagccccctaggatgacaccagacctgagagtctgaagacctggatccaagttctgacttttccccctgacagctgtgtgaccttcgtgaagtcgccaaacctctctgagccccagtcattgctagtaagacctgcctttgagttggtatgatgttcaagttagataacaaaatgtttatacccattagaacagagaataaatagaactacatttcttgca

SEQ ID NO: 470 - DNA, 6070 bp, Homo sapiens
  CFTR
gtagtaggtctttggcattaggagcttgagcccagacggccctagcagggaccccagcgcccgagagaccatgcagaggtcgcctctggaaaaggccagcgttgtctccaaactttttttcagctggaccagaccaattttgaggaaaggatacagacagcgcctggaattgtcagacatataccaaatcccttctgttgattctgctgacaatctatctgaaaaattggaaagagaatgggatagagagctggcttcaaagaaaaatcctaaactcattaatgcccttcggcgatgttttttctggagatttatgttctatggaatctttttatatttaggggaagtcaccaaagcagtacagcctctcttactgggaagaatcatagcttcctatgacccggataacaaggaggaacgctctatcgcgatttatctaggcataggcttatgccttctctttattgtgaggacactgctcctacacccagccatttttggccttcatcacattggaatgcagatgagaatagctatgtttagtttgatttataagaagactttaaagctgtcaagccgtgttctagataaaataagtattggacaacttgttagtctcctttccaacaacctgaacaaatttgatgaaggacttgcattggcacatttcgtgtggatcgctcctttgcaagtggcactcctcatggggctaatctgggagttgttacaggcgtctgccttctgtggacttggtttcctgatagtccttgccctttttcaggctgggctagggagaatgatgatgaagtacagagatcagagagctgggaagatcagtgaaagacttgtgattacctcagaaatgattgaaaatatccaatctgttaaggcatactgctgggaagaagcaatggaaaaaatgattgaaaacttaagacaaacagaactgaaactgactcggaaggcagcctatgtgagatacttcaatagctcagccttcttcttctcagggttctttgtggtgtttttatctgtgcttccctatgcactaatcaaaggaatcatcctccggaaaatattcaccaccatctcattctgcattgttctgcgcatggcggtcactcggcaatttccctgggctgtacaaacatggtatgactctcttggagcaataaacaaaatacaggatttcttacaaaagcaagaatataagacattggaatataacttaacgactacagaagtagtgatggagaatgtaacagccttctgggaggagggatttggggaattatttgagaaagcaaaacaaaacaataacaatagaaaaacttctaatggtgatgacagcctcttcttcagtaatttctcacttcttggtactcctgtcctgaaagatattaatttcaagatagaaagaggacagttgttggcggttgctggatccactggagcaggcaagacttcacttctaatggtgattatgggagaactggagccttcagagggtaaaattaagcacagtggaagaatttcattctgttctcagttttcctggattatgcctggcaccattaaagaaaatatcatctttggtgtttcctatgatgaatatagatacagaagcgtcatcaaagcatgccaactagaagaggacatctccaagtttgcagagaaagacaatatagttcttggagaaggtggaatcacactgagtggaggtcaacgagcaagaatttctttagcaagagcagtatacaaagatgctgatttgtatttattagactctccttttggatacctagatgttttaacagaaaaagaaatatttgaaagctgtgtctgtaaactgatggctaacaaaactaggattttggtcacttctaaaatggaacatttaaagaaagctgacaaaatattaattttgcatgaaggtagcagctatttttatgggacattttcagaactccaaaatctacagccagactttagctcaaaactcatgggatgtgattctttcgaccaatttagtgcagaaagaagaaattcaatcctaactgagaccttacaccgtttctcattagaaggagatgctcctgtctcctggacagaaacaaaaaaacaatcttttaaacagactggagagtttggggaaaaaaggaagaattctattctcaatccaatcaactctatacgaaaattttccattgtgcaaaagactcccttacaaatgaatggcatcgaagaggattctgatgagcctttagagagaaggctgtccttagtaccagattctgagcagggagaggcgatactgcctcgcatcagcgtgatcagcactggccccacgcttcaggcacgaaggaggcagtctgtcctgaacctgatgacacactcagttaaccaaggtcagaacattcaccgaaagacaacagcatccacacgaaaagtgtcactggcccctcaggcaaacttgactgaactggatatatattcaagaaggttatctcaagaaactggcttggaaataagtgaagaaattaacgaagaagacttaaaggagtgcttttttgatgatatggagagcataccagcagtgactacatggaacacataccttcgatatattactgtccacaagagcttaatttttgtgctaatttggtgcttagtaatttttctggcagaggtggctgcttctttggttgtgctgtggctccttggaaacactcctcttcaagacaaagggaatagtactcatagtagaaataacagctatgcagtgattatcaccagcaccagttcgtattatgtgttttacatttacgtgggagtagccgacactttgcttgctatgggattcttcagaggtctaccactggtgcatactctaatcacagtgtcgaaaattttacaccacaaaatgttacattctgttcttcaagcacctatgtcaaccctcaacacgttgaaagcaggtgggattcttaatagattctccaaagatatagcaattttggatgaccttctgcctcttaccatatttgacttcatccagttgttattaattgtgattggagctatagcagttgtcgcagttttacaaccctacatctttgttgcaacagtgccagtgatagtggcttttattatgttgagagcatatttcctccaaacctcacagcaactcaaacaactggaatctgaaggcaggagtccaattttcactcatcttgttacaagcttaaaaggactatggacacttcgtgccttcggacggcagccttactttgaaactctgttccacaaagctctgaatttacatactgccaactggttcttgtacctgtcaacactgcgctggttccaaatgagaatagaaatgatttttgtcatcttcttcattgctgttaccttcatttccattttaacaacaggagaaggagaaggaagagttggtattatcctgactttagccatgaatatcatgagtacattgcagtgggctgtaaactccagcatagatgtggatagcttgatgcgatctgtgagccgagtctttaagttcattgacatgccaacagaaggtaaacctaccaagtcaaccaaaccatacaagaatggccaactctcgaaagttatgattattgagaattcacacgtgaagaaagatgacatctggccctcagggggccaaatgactgtcaaagatctcacagcaaaatacacagaaggtggaaatgccatattagagaacatttccttctcaataagtcctggccagagggtgggcctcttgggaagaactggatcagggaagagtactttgttatcagcttttttgagactactgaacactgaaggagaaatccagatcgatggtgtgtcttgggattcaataactttgcaacagtggaggaaagcctttggagtgataccacagaaagtatttattttttctggaacatttagaaaaaacttggatccctatgaacagtggagtgatcaagaaatatggaaagttgcagatgaggttgggctcagatctgtgatagaacagtttcctgggaagcttgactttgtccttgtggatgggggctgtgtcctaagccatggccacaagcagttgatgtgcttggctagatctgttctcagtaaggcgaagatcttgctgcttgatgaacccagtgctcatttggatccagtaacataccaaataattagaagaactctaaaacaagcatttgctgattgcacagtaattctctgtgaacacaggatagaagcaatgctggaatgccaacaatttttggtcatagaagagaacaaagtgcggcagtacgattccatccagaaactgctgaacgagaggagcctcttccggcaagccatcagcccctccgacagggtgaagctctttccccaccggaactcaagcaagtgcaagtctaagccccagattgctgctctgaaagaggagacagaagaagaggtgcaagatacaaggctttagagagcagcataaatgttgacatgggacatttgctcatggaattggagctcgtgggacagtcacctcatggaattggagctcgtggaacagttacctctgcctcagaaaacaaggatgaattaagtttttttttaaaaaagaaacatttggtaaggggaattgaggacactgatatgggtcttgataaatggcttcctggcaatagtcaaattgtgtgaaaggtacttcaaatccttgaagatttaccacttgtgttttgcaagccagattttcctgaaaacccttgccatgtgctagtaattggaaaggcagctctaaatgtcaatcagcctagttgatcagcttattgtctagtgaaactcgttaatttgtagtgttggagaagaactgaaatcatacttcttagggttatgattaagtaatgataactggaaacttcagcggtttatataagcttgtattcctttttctctcctctccccatgatgtttagaaacacaactatattgtttgctaagcattccaactatctcatttccaagcaagtattagaataccacaggaaccacaagactgcacatcaaaatatgccccattcaacatctagtgagcagtcaggaaagagaacttccagatcctggaaatcagggttagtattgtccaggtctaccaaaaatctcaatatttcagataatcacaatacatcccttacctgggaaagggctgttataatctttcacaggggacaggatggttcccttgatgaagaagttgatatgccttttcccaactccagaaagtgacaagctcacagacctttgaactagagtttagctggaaaagtatgttagtgcaaattgtcacaggacagcccttctttccacagaagctccaggtagagggtgtgtaagtagataggccatgggcactgtgggtagacacacatgaagtccaagcatttagatgtataggttgatggtggtatgttttcaggctagatgtatgtacttcatgctgtctacactaagagagaatgagagacacactgaagaagcaccaatcatgaattagttttatatgcttctgttttataattttgtgaagcaaaattttttctctaggaaatatttattttaataatgtttcaaacatatataacaatgctgtattttaaaagaatgattatgaattacatttgtataaaataatttttatatttgaaatattgactttttatggcactagtatttctatgaaatattatgttaaaactgggacaggggagaacctagggtgatattaaccaggggccatgaatcaccttttggtctggagggaagccttggggctgatgcagttgttgcccacagctgtatgattcccagccagcacagcctcttagatgcagttctgaagaagatggtaccaccagtctgactgtttccatcaagggtacactgccttctcaactccaaactgactcttaagaagactgcattatatttattactgtaagaaaatatcacttgtcaataaaatccatacatttgtgtgaaa

SEQ ID NO: 471 - DNA, 748 bp, Homo sapiens
  ANG
ggagaggcctccaggttcacacaactggaacccatctccaggaacaaacagctggaacccatctcccgttgaagggaaactgccagatttttgtaagattcttcctcctgggagcctgtgttggaagagatggtgatgggcctgggcgttttgttgttggtcttcgtgctgggtctgggtctgaccccaccgaccctggctcaggataactccaggtacacacacttcctgacccagcactatgatgccaaaccacagggccgggatgacagatactgtgaaagcatcatgaggagacggggcctgacctcaccctgcaaagacatcaacacatttattcatggcaacaagcgcagcatcaaggccatctgtgaaaacaagaatggaaaccctcacagagaaaacctaagaataagcaagtcttctttccaggtcaccacttgcaagctacatggaggttccccctggcctccatgccagtaccgagccacagcggggttcagaaacgttgttgttgcttgtgaaaatggcttacctgtccacttggatcagtcaattttccgtcgtccgtaaccagcgggcccctggtcaagtgctggctctgctgtccttgccttccatttcccctctgcacccagaacagtggtggcaacattcattgccaagggcccaaagaaagagctacctggaccttttgttttctgtttgacaacatgtttaataaataaaaatgtcttgatatcagtaa

SEQ ID NO: 472 - DNA, 2249 bp, Homo sapiens
  Presenilin (PSEN2)
gcgtaaactccgctggagcgcggcggcagagcaggcatttccagcagtgaggagacagccagaagcaagcttttggagctgaaggaacctgagacagaagctagtcccccctctgaattttactgatgaagaaactgaggccacagagctaaagtgacttttcccaaggtcgcccagcgaggacgtgggacttctcagacgtcaggagagtgatgtgagggagctgtgtgaccatagaaagtgacgtgttaaaaaccagcgctgccctctttgaaagccagggagcatcattcatttagcctgctgagaagaagaaaccaagtgtccgggattcagacctctctgcggccccaagtgttcgtggtgcttccagaggcagggctatgctcacattcatggcctctgacagcgaggaagaagtgtgtgatgagcggacgtccctaatgtcggctgagagccccacgccgcgctcctgccaggagggcaggcagggcccagaggatggagagaacactgcccagtggagaagccaggagaacgaggaggacggtgaggaggaccctgaccgctatgtctgtagtggggttcccgggcggccgccaggcctggaggaagagctgaccctcaaatacggagcgaagcacgtgatcatgctgtttgtgcctgtcactctgtgcatgatcgtggtggtagccaccatcaagtctgtgcgcttctacacagagaagaatggacagctcatctacacgccattcactgaggacacaccctcggtgggccagcgcctcctcaactccgtgctgaacaccctcatcatgatcagcgtcatcgtggttatgaccatcttcttggtggtgctctacaagtaccgctgctacaagttcatccatggctggttgatcatgtcttcactgatgctgctgttcctcttcacctatatctaccttggggaagtgctcaagacctacaatgtggccatggactaccccaccctcttgctgactgtctggaacttcggggcagtgggcatggtgtgcatccactggaagggccctctggtgctgcagcaggcctacctcatcatgatcagtgcgctcatggccctagtgttcatcaagtacctcccagagtggtccgcgtgggtcatcctgggcgccatctctgtgtatgatctcgtggctgtgctgtgtcccaaagggcctctgagaatgctggtagaaactgcccaggagagaaatgagcccatattccctgccctgatatactcatctgccatggtgtggacggttggcatggcgaagctggacccctcctctcagggtgccctccagctcccctacgacccggagatggaagaagactcctatgacagttttggggagccttcataccccgaagtctttgagcctcccttgactggctacccaggggaggagctggaggaagaggaggaaaggggcgtgaagcttggcctcggggacttcatcttctacagtgtgctggtgggcaaggcggctgccacgggcagcggggactggaataccacgctggcctgcttcgtggccatcctcattggcttgtgtctgaccctcctgctgcttgctgtgttcaagaaggcgctgcccgccctccccatctccatcacgttcgggctcatcttttacttctccacggacaacctggtgcggccgttcatggacaccctggcctcccatcagctctacatctgagggacatggtgtgccacaggctgcaagctgcagggaattttcattggatgcagttgtatagttttacactctagtgccatatatttttaagacttttctttccttaaaaaataaagtacgtgtttacttggtgaggaggaggcagaaccagctctttggtgccagctgtttcatcaccagactttggctcccgctttggggagcgcctcgcttcacggacaggaagcacagcaggtttatccagatgaactgagaaggtcagattagggcggggagaagagcatccggcatgagggctgagatgcgcaaagagtgtgctcgggagtggcccctggcacctgggtgctctggctggagaggaaaagccagttccctacgaggagtgttcccaatgctttgtccatgatgtccttgttattttattgcctttagaaactgagtcctgttcttgttacggcagtcacactgctgggaagtggcttaatagtaatatcaataaatagatgagtcctgttagaa

SEQ ID NO: 473 - DNA, 2394 bp, Homo sapiens
  Isl1
gagtctgccgccgccgcagcgcctccgctccgccaactccgccggcttaaattggactcctagatccgcgagggcgcggcgcagccgagcagcggctctttcagcattggcaaccccaggggccaatatttcccacttagccacagctccagcatcctctctgtgggctgttcaccaactgtacaaccaccatttcactgtggacattactccctcttacagatatgggagacatgggagatccaccaaaaaaaaaacgtctgatttccctatgtgttggttgcggcaatcagattcacgatcagtatattctgagggtttctccggatttggaatggcatgcggcatgtttgaaatgtgcggagtgtaatcagtatttggacgagagctgtacatgctttgttagggatgggaaaacctactgtaaaagagattatatcaggttgtacgggatcaaatgcgccaagtgcagcatcggcttcagcaagaacgacttcgtgatgcgtgcccgctccaaggtgtatcacatcgagtgtttccgctgtgtggcctgcagccgccagctcatccctggggacgaatttgcgcttcgggaggacggtctcttctgccgagcagaccacgatgtggtggagagggccagtctaggcgctggcgacccgctcagtcccctgcatccagcgcggccactgcaaatggcagcggagcccatctccgccaggcagccagccctgcggccccacgtccacaagcagccggagaagaccacccgcgtgcggactgtgctgaacgagaagcagctgcacaccttgcggacctgctacgccgcaaacccgcggccagatgcgctcatgaaggagcaactggtagagatgacgggcctcagtccccgtgtgatccgggtctggtttcaaaacaagcggtgcaaggacaagaagcgaagcatcatgatgaagcaactccagcagcagcagcccaatgacaaaactaatatccaggggatgacaggaactcccatggtggctgccagtccagagagacacgacggtggcttacaggctaacccagtggaagtacaaagttaccagccaccttggaaagtactgagcgacttcgccttgcagagtgacatagatcagcctgcttttcagcaactggtcaatttttcagaaggaggaccgggctctaattccactggcagtgaagtagcatcaatgtcctctcaacttccagatacacctaacagcatggtagccagtcctattgaggcatgaggaacattcattctgtattttttttccctgttggagaaagtgggaaattataatgtcgaactctgaaacaaaagtatttaacgacccagtcaatgaaaactgaatcaagaaatgaatgctccatgaaatgcacgaagtctgttttaatgacaaggtgatatggtagcaacactgtgaagacaatcatgggattttactagaattaaacaacaaacaaaacgcaaaacccagtatatgctattcaatgatcttagaagtactgaaaaaaaaagacgtttttaaaacgtagaggatttatattcaaggatctcaaagaaagcattttcatttcactgcacatctagagaaaaacaaaaatagaaaattttctagtccatcctaatctgaatggtgctgtttctatattggtcattgccttgccaaacaggagctccagcaaaagcgcaggaagagagactggcctccttggctgaaagagtcctttcaggaaggtggagctgcattggtttgatatgtttaaagttgactttaacaaggggttaattgaaatcctgggtctcttggcctgtcctgtagctggtttattttttactttgccccctccccactttttttgagatccatcctttatcaagaagtctgaagcgactataaaggtttttgaattcagatttaaaaaccaacttataaagcattgcaacaaggttacctctattttgccacaagcgtctcgggattgtgtttgacttgtgtctgtccaagaacttttcccccaaagatgtgtatagttattggttaaaatgactgttttctctctctatggaaataaaaaggaaaaaaaaaaaggaaactttttttgtttgctcttgcattgcaaaaattataaagtaatttattatttattgtcggaagacttgccacttttcatgtcatttgacattttttgtttgctgaagtgaaaaaaaaagataaaggttgtacggtggtctttgaattatatgtctaattctatgtgttttgtctttttcttaaatattatgtgaaatcaaagcgccatatgtagaattatatcttcaggactatttcactaataaacatttggcatagataaataaataaa

SEQ ID NO: 474 - DNA, 3493 bp, Homo sapiens
  SERCA 1a (ATP2A1)
ggccggctgctcaagtgggacgggggtcagagctttgtggagggaagaaaaacctggagggggcaggagagtaaaaagaagaaacccaggcagacaggcagttggacacactgaggaagaccccccacgagtgggaaccccctggaaggaacacaccggccccggcccccaggaagggagcacaatggaggccgctcatgctaaaaccacggaggaatgtttggcctattttggggtgagtgagaccacgggcctcaccccggaccaagttaagcggaatctggagaaatacggcctcaatgagctccctgctgaggaagggaagaccctgtgggagctggtgatagagcagtttgaagacctcctggtgcggattctcctcctggccgcatgcatttccttcgtgctggcctggtttgaggaaggtgaagagaccatcactgcctttgttgaaccctttgtcatcctcttgatcctcattgccaatgccatcgtgggggtttggcaggagcggaacgcagagaacgccatcgaggccctgaaggagtatgagccagagatggggaaggtctaccgggctgaccgcaagtcagtgcaaaggatcaaggctcgggacatcgtccctggggacatcgtggaggtggctgtgggggacaaagtccctgcagacatccgaatcctcgccatcaaatccaccacgctgcgggttgaccagtccatcctgacaggcgagtctgtatctgtcatcaaacacacggagcccgttcctgacccccgagctgtcaaccaggacaagaagaacatgcttttctcgggcaccaacattgcagccggcaaggccttgggcatcgtggccaccactggtgtgggcaccgagattgggaagatccgagaccaaatggctgccacagaacaggacaagacccccttgcagcagaagctggatgagtttggggagcagctctccaaggtcatctccctcatctgtgtggctgtctggcttatcaacattggccacttcaacgaccccgtccatgggggctcctggttccgcggggccatctactactttaagattgccgtggccttggctgtggctgccatccccgaaggtcttcctgcagtcatcaccacctgcctggccctgggtacccgtcggatggcaaagaagaatgccattgtaagaagcttgccctccgtagagaccctgggctgcacctctgtcatctgttccgacaagacaggcaccctcaccaccaaccagatgtctgtctgcaagatgtttatcattgacaaggtggatggggacatctgcctcctgaatgagttctccatcaccggctccacttacgctccagagggagaggtcttgaagaatgataagccagtccggccagggcagtatgacgggctggtggagctggccaccatctgtgccctctgcaatgactcctccttggacttcaacgaggccaaaggtgtctatgagaaggtcggcgaggccaccgagacagcactcaccaccctggtggagaagatgaatgtgttcaacacggatgtgagaagcctctcgaaggtggagagagccaacgcctgcaactcggtgatccgccagctaatgaagaaggaattcaccctggagttctcccgagacagaaagtccatgtctgtctattgctccccagccaaatcttcccgggctgctgtgggcaacaagatgtttgtcaagggtgcccctgagggcgtcatcgaccgctgtaactatgtgcgagttggcaccacccgggtgccactgacggggccggtgaaggaaaagatcatggcggtgatcaaggagtggggcactggccgggacaccctgcgctgcttggccctggccacccgggacacccccccgaagcgagaggaaatggtcctggatgactctgccaggttcctggagtatgagacggacctgacattcgtgggtgtagtgggcatgctggaccctccgcgcaaggaggtcacgggctccatccagctgtgccgtgacgccgggatccgggtgatcatgatcactggggacaacaagggcacagccattgccatctgccggcgaattggcatctttggggagaacgaggaggtggccgatcgcgcctacacgggccgagagttcgacgacctgcccctggctgaacagcgggaagcctgccgacgtgcctgctgcttcgcccgtgtggagccctcgcacaagtccaagattgtggagtacctgcagtcctacgatgagatcacagccatgacaggtgatggcgtcaatgacgcccctgccctgaagaaggctgagattggcattgccatgggatctggcactgccgtggccaagactgcctctgagatggtgctggctgacgacaacttctccaccatcgtagctgctgtggaggagggccgcgccatctacaacaacatgaagcagttcatccgctacctcatttcctccaacgtgggcgaggtggtctgtatcttcctgaccgctgccctggggctgcctgaggccctgatcccggtgcagctgctatgggtgaacttggtgaccgacgggctcccagccacagccctgggcttcaacccaccagacctggacatcatggaccgccccccccggagccccaaggagcccctcatcagtggctggctcttcttccgctacatggcaatcgggggctatgtgggtgcagccaccgtgggagcagctgcctggtggttcctgtacgctgaggatgggcctcatgtcaactacagccagctgactcacttcatgcagtgcaccgaggacaacacccactttgagggcatagactgtgaggtcttcgaggcccccgagcccatgaccatggccctgtccgtgctggtgaccatcgagatgtgcaatgcactgaacagcctgtccgagaaccagtccctgctgcggatgccaccctgggtgaacatctggctgctgggctccatctgcctctccatgtccctgcacttcctcatcctctatgttgaccccctgccgatgatcttcaagctccgggccctggacctcacccagtggctcatggtcctcaagatctcactgccagtcattgggctcgacgaaatcctcaagttcgttgctcggaactacctagagggataactgttccccctcctccatctctgagcccgtgtcacagatccagaagatgaaagaaggaagtgagcatccttttgctctgtcctccccaccccgatagtgacacatcttcaggcagagctgtggcacagacccccgtcctgtcccccacacccgtgtcatgtgtctgtttataaacatgtccccttccctttccttccccctcggccacccgcctccctctcaaccttgtaaattccccttcccaaccccgaggggcttgcagggacaaggcgaccgactgcgctgagctgcttatttattgaaaataaacgacggaaaagtctg

SEQ ID NO: 475 - DNA, 4325 bp, Homo sapiens
  SERCA2a (ATP2A2)
attagagcagccgccgcggagccgtccccgacgccacctccttttccttcgccgcagtttcctccgccgctgtcgggcgtgcggcgctgagggacccgggcgagcgcgccgcgcaccgccccgccggctcgcctccctcgccgcgttccgccctcagtggtctgccgggcgccccctcctccggcccgggcggggcctctgatcgcctcaagagagcggggagggggctcgggggccgcggcctgccctcccggcgggcggctgagggcgagggaggccctcccttctggcgaggggagggagggtgggtcaggagcccccaacccgccctgcggagctcggggccgcgcgaggggcggttgtctgggggagggggcgcggggtgattcagcgcccggcgaggcggaagcggccgcaagaggaggaggggagagcccgtccgcgcctgggctcccggggtggcacgagcccgcggccggagtgcgaggcggaggcgaggaggccgcggggacgggaggcgaggccggccgggcccccgaagccatggagaacgcgcacaccaagacggtggaggaggtgctgggccacttcggcgtcaacgagagtacggggctgagcctggaacaggtcaagaagcttaaggagagatggggctccaacgagttaccggctgaagaaggaaaaaccttgctggaacttgtgattgagcagtttgaagacttgctagttaggattttattactggcagcatgtatatcttttgttttggcttggtttgaagaaggtgaagaaacaattacagcctttgtagaaccttttgtaattttactcatattagtagccaatgcaattgtgggtgtatggcaggaaagaaatgctgaaaatgccatcgaagcccttaaggaatatgagcctgaaatgggcaaagtgtatcgacaggacagaaagagtgtgcagcggattaaagctaaagacatagttcctggtgatattgtagaaattgctgttggtgacaaagttcctgctgatataaggttaacttccatcaaatctaccacactaagagttgaccagtcaattctcacaggtgaatctgtctctgtcatcaagcacactgatcccgtccctgacccacgagctgtcaaccaagataaaaagaacatgctgttttctggtacaaacattgctgctgggaaagctatgggagtggtggtagcaactggagttaacaccgaaattggcaagatccgggatgaaatggtggcaacagaacaggagagaacaccccttcagcaaaaactagatgaatttggggaacagctttccaaagtcatctcccttatttgcattgcagtctggatcataaatattgggcacttcaatgacccggttcatggagggtcctggatcagaggtgctatttactactttaaaattgcagtggccctggctgtagcagccattcctgaaggtctgcctgcagtcatcaccacctgcctggctcttggaactcgcagaatggcaaagaaaaatgccattgttcgaagcctcccgtctgtggaaacccttggttgtacttctgttatctgctcagacaagactggtacacttacaacaaaccagatgtcagtctgcaggatgttcattctggacagagtggaaggtgatacttgttcccttaatgagtttaccataactggatcaacttatgcacctattggagaagtgcataaagatgataaaccagtgaattgtcaccagtatgatggtctggtagaattagcaacaatttgtgctctttgtaatgactctgctttggattacaatgaggcaaagggtgtgtatgaaaaagttggagaagctacagagactgctctcacttgcctagtagagaagatgaatgtatttgataccgaattgaagggtctttctaaaatagaacgtgcaaatgcctgcaactcagtcattaaacagctgatgaaaaaggaattcactctagagttttcacgtgacagaaagtcaatgtcggtttactgtacaccaaataaaccaagcaggacatcaatgagcaagatgtttgtgaagggtgctcctgaaggtgtcattgacaggtgcacccacattcgagttggaagtactaaggttcctatgacctctggagtcaaacagaagatcatgtctgtcattcgagagtggggtagtggcagcgacacactgcgatgcctggccctggccactcatgacaacccactgagaagagaagaaatgcaccttgaggactctgccaactttattaaatatgagaccaatctgaccttcgttggctgcgtgggcatgctggatcctccgagaatcgaggtggcctcctccgtgaagctgtgccggcaagcaggcatccgggtcatcatgatcactggggacaacaagggcactgctgtggccatctgtcgccgcatcggcatcttcgggcaggatgaggacgtgacgtcaaaagctttcacaggccgggagtttgatgaactcaacccctccgcccagcgagacgcctgcctgaacgcccgctgttttgctcgagttgaaccctcccacaagtctaaaatcgtagaatttcttcagtcttttgatgagattacagctatgactggcgatggcgtgaacgatgctcctgctctgaagaaagccgagattggcattgctatgggctctggcactgcggtggctaaaaccgcctctgagatggtcctggcggatgacaacttctccaccattgtggctgccgttgaggaggggcgggcaatctacaacaacatgaaacagttcatccgctacctcatctcgtccaacgtcggggaagttgtctgtattttcctgacagcagcccttggatttcccgaggctttgattcctgttcagctgctctgggtcaatctggtgacagatggcctgcctgccactgcactggggttcaaccctcctgatctggacatcatgaataaacctccccggaacccaaaggaaccattgatcagcgggtggctctttttccgttacttggctattggctgttacgtcggcgctgctaccgtgggtgctgctgcatggtggttcattgctgctgacggtggtccaagagtgtccttctaccagctgagtcatttcctacagtgtaaagaggacaacccggactttgaaggcgtggattgtgcaatctttgaatccccatacccgatgacaatggcgctctctgttctagtaactatagaaatgtgtaacgccctcaacagcttgtccgaaaaccagtccttgctgaggatgcccccctgggagaacatctggctcgtgggctccatctgcctgtccatgtcactccacttcctgatcctctatgtcgaacccttgccactcatcttccagatcacaccgctgaacgtgacccagtggctgatggtgctgaaaatctccttgcccgtgattctcatggatgagacgctcaagtttgtggcccgcaactacctggaacctgcaatactggagtaaccgcttcctaaaccattttgcagaaatgtaagggtgttcggttgcgtgcatgtgcgtttttagcaacacatctaccaaccctgtgcatgactgatgttggggaaaaagaaaagtaaaaaacttcccaactcactttgtgttatgtggaggaaatgtgtattaccaatggggttgttagcttttaaatcaaaatactgattacagatgtacaatttagcttaatcagaaagcctctccagagaagtttggtttctttgctgcaagaggaatgaggctctgtaaccttatctaagaacttggaagccgtcagccaagtcgccacatttctctgcaaaatgtcatagcttatataaatgtacagtattcaattgtaatgcatgccttcggttgtaagtagccagatccctctccagtgacattggaacatgctactttttaattggccctgtacagtttgcttatttataaattcattaaaaacactacaggtgttgaatggttaaaatgtaggcctccagttcattttcagttattttctgagtgtgcagacagctatttcgcactgtattaaatgtaacttatttaatgaaatcagaagcagtagacagatgttggtgcaatacaaatattgtgatgcatttatcttaataaaatgctaaatgtcaatttatcactgcgcatgtttgactttagactgtaaatagagatcagtttgtttctttctgtgctggtaacaatgagcgtcgcacagacatggtttcaggtaaataaatctattctatgataaa

SEQ ID NO: 476 - DNA, 2989 bp, Homo sapiens
  Phospholamban (PLN)
ataaactgggtgacagagtcagaaaactccccagctaaacacccgtaagacttcatacaacacaatactctatactgtgatgatcacagctgccaaggctacctaaaagaagacagttatctcatatttggctgccagctttttatctttctctcgaccacttaaaacttcagacttcctgtcctgctggtatcatggagaaagtccaatacctcactcgctcagctataagaagagcctcaaccattgaaatgcctcaacaagcacgtcaaaagctacagaatctatttatcaatttctgtctcatcttaatatgtctcttgctgatctgtatcatcgtgatgcttctctgaagttctgctacaacctctagatctgcagcttgccacatcagcttaaaatctgtcatcccatgcagacaggaaaacaatattgtataacagaccacttcctgagtagaagagtttctttgtgaaaaggtcaagattaagactaaaacttattgttaccatatgtattcatctgttggatcttgtaaacatgaaaagggctttattttcaaaaattaacttcaaaataagtgtataaaatgcaactgttgatttcctcaacatggctcacaaatttctatcccaaatcttttctgaagatgaagagtttagttttaaaactgcactgccaacaagttcacttcatatataaagcattatttttactcttttgaggtgaatataatttatattacaatgtaaaagcttctttaatactaagtatttttcaggtcttcaccaagtatcaaagtaataacacaaatgaagtgtcattattcaaaatagtccactgactcctcacatctgttatcttattataaagaactatttgtagtaactatcagaatctacattctaaaacagaaattgtattttttctatgccacattaacatcttttaaagttgatgagaatcaagtatggaaaagtaaggccatactcttacataataaaattccttttaagtaattttttcaaagaatcacagaattctagtacatgtaggtaaatcataaatctgttctaagacatatgatcaacagatgagaactggtggttaatatgtgacagtgagattagtcatatcactaatatactaacaacagaatctaatcttcatttaaggcactgtagtgaattatctgagctagagttacctagcttaccatactatatctttggaatcatgaaaccttaagacttcagaatgattttgcaggttgtcttccattccagcctaacatccaatgcaggcaaggaaaataaaagatttccagtgacagaaaaatatattatctcaagtattttttaaaaatatatgaattctctctccaaatattaactaattattagattatattttgaaatgaacttgttggcccatctattacatctacagctgacccttgaacatgggggttaggggagctgacaattcgtgggtccgcaaaatcttaactacctaatagcctactattgaccataaaccttactgataacataaacagtaaattaacacatattttgcgtgttatatgtattatacactatattcctacaataaagtaagctagagaaaatgttatttagaaaatcataagaaagagaaaatatatttactattcattaaatggaagtgggtcaacataaaagtcttcattctcattgtcttcacattgagtaggcagaggaggagaaagatggggaggaagagaaggcgttggtcttgcagtcttgtcttaggggtgtggggagtgggggaaagaatattcatgtataagtggacccttgcaattcaagcccttgttgttcaagggtcaactgtaataggatatagctatttttcttcctctatcaaccaaatggtaagcatctattttgcagtccactctactgagctaaattatagatccagctatgctatttataattattttcttgatgaataaattttcaatttctcctctgaccatttcagaacatcttccaataactcataaaacaactgaagtaaaattgagtgctggaaaatatattcaccaaactttggtaatttaagttgactaaagtttaaaattaagtctaaaatagtttacacctatactgcataatccaacaattttaatttcagttgaagacatgttactaatataactattattaaaagagtagaggatgtgtaattaaccatatcttctaaaacatggttactaaaagaatatgtaacatcaatattgaccttggtttcttacacaagtgttgctaactcaatagtgaaggagacactattaaattttctgaacccatgagagatactagagatggggagtggaaagtgtttggttcagggatatctgaagaacagaagggcagagatttcttaagtgacgcctcatctacaagctggaaattcctaaaaacaagtagaaagcttataaacaacaggtgatacactcacctcactggttttagtaaattaccaatacagaaagtatccctagtcttaaaaacaagtggaaaatttgaactgattagtcatattcctttgattacactgtttgttacaatatttttctcagtaaacagaaataactaatttttttgttcttcattctttgatagaaattaaaatcttattctgtgaggattacagaatactataactcaaattataaagtagaataaactctttaaataattattcttcatcataaagtgtaaagaataagatataagaaaacaatttatttttaaaatttaatatactaaatgctcaaatatgttctactatagaataagttcttatcttaatttacagggcactaaaaacaattttaaaatgcttaatgttgccttttatattttaattggttaagaatatatatttgtttaatgcaaatcagaatcactatattaaaatgaatgttcttgaaaactca

SEQ ID NO: 477 - DNA, 3403 bp, Homo sapiens
  bARK (ADRBK1, GRK2, BARK1)
agtcccggcgggagcggagcgcgagccggggccgggcccgagccggcgccatggggcggcgccgcctgtgagcggcggcgagcggagccgcgggcgccgagcagggccaggcgggaggcgtcggcgcccgaggccgagcgagccgcggccgggccgggccgagcgccgagcgagcaggagcggcggcggcggcggcggcggcgggaggaggcagcgccgccgccaagatggcggacctggaggcggtgctggccgacgtgagctacctgatggccatggagaagagcaaggccacgccggccgcgcgcgccagcaagaagatcctgctgcccgagcccagcatccgcagtgtcatgcagaagtacctggaggaccggggcgaggtgacctttgagaagatcttttcccagaagctggggtacctgctcttccgagacttctgcctgaaccacctggaggaggccaggcccttggtggaattctatgaggagatcaagaagtacgagaagctggagacggaggaggagcgtgtggcccgcagccgggagatcttcgactcatacatcatgaaggagctgctggcctgctcgcatcccttctcgaagagtgccactgagcatgtccaaggccacctggggaagaagcaggtgcctccggatctcttccagccatacatcgaagagatttgtcaaaacctccgaggggacgtgttccagaaattcattgagagcgataagttcacacggttttgccagtggaagaatgtggagctcaacatccacctgaccatgaatgacttcagcgtgcatcgcatcattgggcgcgggggctttggcgaggtctatgggtgccggaaggctgacacaggcaagatgtacgccatgaagtgcctggacaaaaagcgcatcaagatgaagcagggggagaccctggccctgaacgagcgcatcatgctctcgctcgtcagcactggggactgcccattcattgtctgcatgtcatacgcgttccacacgccagacaagctcagcttcatcctggacctcatgaacggtggggacctgcactaccacctctcccagcacggggtcttctcagaggctgacatgcgcttctatgcggccgagatcatcctgggcctggagcacatgcacaaccgcttcgtggtctaccgggacctgaagccagccaacatccttctggacgagcatggccacgtgcggatctcggacctgggcctggcctgtgacttctccaagaagaagccccatgccagcgtgggcacccacgggtacatggctccggaggtcctgcagaagggcgtggcctacgacagcagtgccgactggttctctctggggtgcatgctcttcaagttgctgcgggggcacagccccttccggcagcacaagaccaaagacaagcatgagatcgaccgcatgacgctgacgatggccgtggagctgcccgactccttctcccctgaactacgctccctgctggaggggttgctgcagagggatgtcaaccggagattgggctgcctgggccgaggggctcaggaggtgaaagagagcccctttttccgctccctggactggcagatggtcttcttgcagaagtaccctcccccgctgatccccccacgaggggaggtgaacgcggccgacgccttcgacattggctccttcgatgaggaggacacaaaaggaatcaagttactggacagtgatcaggagctctaccgcaacttccccctcaccatctcggagcggtggcagcaggaggtggcagagactgtcttcgacaccatcaacgctgagacagaccggctggaggctcgcaagaaagccaagaacaagcagctgggccatgaggaagactacgccctgggcaaggactgcatcatgcatggctacatgtccaagatgggcaaccccttcctgacccagtggcagcggcggtacttctacctgttccccaaccgcctcgagtggcggggcgagggcgaggccccgcagagcctgctgaccatggaggagatccagtcggtggaggagacgcagatcaaggagcgcaagtgcctgctcctcaagatccgcggtgggaaacagttcattttgcagtgcgatagcgaccctgagctggtgcagtggaagaaggagctgcgcgacgcctaccgcgaggcccagcagctggtgcagcgggtgcccaagatgaagaacaagccgcgctcgcccgtggtggagctgagcaaggtgccgctggtccagcgcggcagtgccaacggcctctgacccgcccacccgccttttataaacctctaatttattttgtcgaatttttattatttgttttcccgccaagcggaaaaggttttattttgtaattattgtgatttcccgtggccccagcctggcccagctcccccgggaggggcccgcttgcctcggctcctgctgcaccaacccagccgctgcccggcgccctctgtcctgacttcaggggctgcccgctcccagtgtcttcctgtgggggaagagcacagccctcccgccccttccccgagggatgatgccacaccaagctgtgccaccctgggctctgtgggctgcactctgtgcccatgggcactgctgggtggcccatcccccctcaccaggggcaggcacagcacagggatccgacttgaattttcccactgcaccccctcctgctgcagaggggcaggccctgcactgtcctgctccacagtgttggcgagaggaggggcccgttgtctccctggccctcaaggcctcccacagtgactcgggctcctgtgcccttattcaggaaaagcctctgtgtcactggctgcctccactcccacttccctgacactgcggggcttggctgagagagtggcattggcagcaggtgctgctaccctccctgctgtcccctcttgccccaacccccagcacccgggctcagggaccacagcaaggcacctgcaggttgggccatactggcctcgcctggcctgaggtctcgctgatgctgggctgggtgcgaccccatctgcccaggacggggccggccaggtgggcgggcagcacagcaaggaggctggctggggcctatcagtgtgccccccatcctggcccatcagtgtacccccgcccaggctggccagccccacagcccacgtcctgtcagtgccgccgcctcgcccaccgcatgccccctcgtgccagtcgcgctgcctgtgtggtgtcgcgccttctcccccccggggctgggttggcgcaccctcccctcccgtctactcattccccggggcgtttctttgccgatttttgaatgtgattttaaagagtgaaaaatgagactatgcgtttttataaaaaatggtgcctga

SEQ ID NO: 478 - DNA, 3039 bp, Homo sapiens
  beta-adrenergic receptor (ADRB1)
agaaacatgctgaagtcccggcggctcttccagcagcggcagcggctccagcagcagcggcggcggcggcggcggcggcagcggcagcgacagcgctcggctcctgcgggaaaggcgcccggcgcccatgcctccggccccgcgccgcggctgccctgacccggccgcgacctccctctgcgcaccacgccgcccgggcttctggggtgttccccaaccacggcccagccctgccacaccccccgcccccggcctccgcagctcggcatgggcgcgggggtgctcgtcctgggcgcctccgagcccggtaacctgtcgtcggccgcaccgctccccgacggcgcggccaccgcggcgcggctgctggtgcccgcgtcgccgcccgcctcgttgctgcctcccgccagcgaaagccccgagccgctgtctcagcagtggacagcgggcatgggtctgctgatggcgctcatcgtgctgctcatcgtggcgggcaatgtgctggtgatcgtggccatcgccaagacgccgcggctgcagacgctcaccaacctcttcatcatgtccctggccagcgccgacctggtcatggggctgctggtggtgccgttcggggccaccatcgtggtgtggggccgctgggagtacggctccttcttctgcgagctgtggacctcagtggacgtgctgtgcgtgacggccagcatcgagaccctgtgtgtcattgccctggaccgctacctcgccatcacctcgcccttccgctaccagagcctgctgacgcgcgcgcgggcgcggggcctcgtgtgcaccgtgtgggccatctcggccctggtgtccttcctgcccatcctcatgcactggtggcgggcggagagcgacgaggcgcgccgctgctacaacgaccccaagtgctgcgacttcgtcaccaaccgggcctacgccatcgcctcgtccgtagtctccttctacgtgcccctgtgcatcatggccttcgtgtacctgcgggtgttccgcgaggcccagaagcaggtgaagaagatcgacagctgcgagcgccgtttcctcggcggcccagcgcggccgccctcgccctcgccctcgcccgtccccgcgcccgcgccgccgcccggacccccgcgccccgccgccgccgccgccaccgccccgctggccaacgggcgtgcgggtaagcggcggccctcgcgcctcgtggccctgcgcgagcagaaggcgctcaagacgctgggcatcatcatgggcgtcttcacgctctgctggctgcccttcttcctggccaacgtggtgaaggccttccaccgcgagctggtgcccgaccgcctcttcgtcttcttcaactggctgggctacgccaactcggccttcaaccccatcatctactgccgcagccccgacttccgcaaggccttccagggactgctctgctgcgcgcgcagggctgcccgccggcgccacgcgacccacggagaccggccgcgcgcctcgggctgtctggcccggcccggacccccgccatcgcccggggccgcctcggacgacgacgacgacgatgtcgtcggggccacgccgcccgcgcgcctgctggagccctgggccggctgcaacggcggggcggcggcggacagcgactcgagcctggacgagccgtgccgccccggcttcgcctcggaatccaaggtgtagggcccggcgcggggcgcggactccgggcacggcttcccaggggaacgaggagatctgtgtttacttaagaccgatagcaggtgaactcgaagcccacaatcctcgtctgaatcatccgaggcaaagagaaaagccacggaccgttgcacaaaaaggaaagtttgggaagggatgggagagtggcttgctgatgttccttgttgttttttttttcttttcttttctttcttcttcttttttttttttttttttttttctgtttgtggtccggccttcttttgtgtgtgcgtgtgatgcatctttagatttttttcccccaccaggtggtttttgacactctctgagaggaccggagtggaagatgggtgggttaggggaagggagaagcattaggaggggattaaaatcgatcatcgtggctcccatccctttcccgggaacaggaacacactaccagccagagagaggagaatgacagtttgtcaagacatatttccttttgctttccagagaaatttcattttaatttctaagtaatgatttctgctgttatgaaagcaaagagaaaggatggaggcaaaataaaaaaaaatcacgtttcaagaaatgttaagctcttcttggaacaagccccaccttgctttccttgtgtagggcaaacccgctgtcccccgcgcgcctgggtggtcaggctgagggatttctacctcacactgtgcatttgcacagcagatagaaagacttgtttatattaaacagcttatttatgtatcaatattagttggaaggaccaggcgcagagcctctctctgtgacatgtgactctgtcaattgaagacaggacattaaaagagagcgagagagagaaacagttcagattactgcacatgtggataaaaacaaaaacaaaaaaaaggagtggttcaaaatgccatttttgcacagtgttaggaattacaaaatccacagaagatgttacttgcacaaaaagaaattaaatattttttaaagggagaggggctgggcagatcttaaataaaattcaaactctacttctgttgtctagtatgttattgagctaatgattcattgggaaaatacctttttatactcctttatcatggtactgtaactgtatccatattataaatataattatcttaaggattttttatttttttttatgtccaagtgcccacgtgaatttgctggtgaaagttagcacttgtgtgtaaattctacttcctcttgtgtgttttaccaagtatttatactctggtgcaactaactactgtgtgaggaattggtccatgtgcaataaataccaatgaagcacaa

SEQ ID NO: 479 - DNA, 3008 bp, Homo sapiens
  Akt (AKT1)
taattatgggtctgtaaccaccctggactgggtgctcctcactgacggacttgtctgaacctctctttgtctccagcgcccagcactgggcctggcaaaacctgagacgcccggtacatgttggccaaatgaatgaaccagattcagaccggcaggggcgctgtggtttaggaggggcctggggtttctcccaggaggtttttgggcttgcgctggagggctctggactcccgtttgcgccagtggcctgcatcctggtcctgtcttcctcatgtttgaatttctttgctttcctagtctggggagcagggaggagccctgtgccctgtcccaggatccatgggtaggaacaccatggacagggagagcaaacggggccatctgtcaccaggggcttagggaaggccgagccagcctgggtcaaagaagtcaaaggggctgcctggaggaggcagcctgtcagctggtgcatcagaggctgtggccaggccagctgggctcggggagcgccagcctgagaggagcgcgtgagcgtcgcgggagcctcgggcaccatgagcgacgtggctattgtgaaggagggttggctgcacaaacgaggggagtacatcaagacctggcggccacgctacttcctcctcaagaatgatggcaccttcattggctacaaggagcggccgcaggatgtggaccaacgtgaggctcccctcaacaacttctctgtggcgcagtgccagctgatgaagacggagcggccccggcccaacaccttcatcatccgctgcctgcagtggaccactgtcatcgaacgcaccttccatgtggagactcctgaggagcgggaggagtggacaaccgccatccagactgtggctgacggcctcaagaagcaggaggaggaggagatggacttccggtcgggctcacccagtgacaactcaggggctgaagagatggaggtgtccctggccaagcccaagcaccgcgtgaccatgaacgagtttgagtacctgaagctgctgggcaagggcactttcggcaaggtgatcctggtgaaggagaaggccacaggccgctactacgccatgaagatcctcaagaaggaagtcatcgtggccaaggacgaggtggcccacacactcaccgagaaccgcgtcctgcagaactccaggcaccccttcctcacagccctgaagtactctttccagacccacgaccgcctctgctttgtcatggagtacgccaacgggggcgagctgttcttccacctgtcccgggagcgtgtgttctccgaggaccgggcccgcttctatggcgctgagattgtgtcagccctggactacctgcactcggagaagaacgtggtgtaccgggacctcaagctggagaacctcatgctggacaaggacgggcacattaagatcacagacttcgggctgtgcaaggaggggatcaaggacggtgccaccatgaagaccttttgcggcacacctgagtacctggcccccgaggtgctggaggacaatgactacggccgtgcagtggactggtgggggctgggcgtggtcatgtacgagatgatgtgcggtcgcctgcccttctacaaccaggaccatgagaagctttttgagctcatcctcatggaggagatccgcttcccgcgcacgcttggtcccgaggccaagtccttgctttcagggctgctcaagaaggaccccaagcagaggcttggcgggggctccgaggacgccaaggagatcatgcagcatcgcttctttgccggtatcgtgtggcagcacgtgtacgagaagaagctcagcccacccttcaagccccaggtcacgtcggagactgacaccaggtattttgatgaggagttcacggcccagatgatcaccatcacaccacctgaccaagatgacagcatggagtgtgtggacagcgagcgcaggccccacttcccccagttctcctactcggccagcggcacggcctgaggcggcggtggactgcgctggacgatagcttggagggatggagaggcggcctcgtgccatgatctgtatttaatggtttttatttctcgggtgcatttgagagaagccacgctgtcctctcgagcccagatggaaagacgtttttgtgctgtgggcagcaccctcccccgcagcggggtagggaagaaaactatcctgcgggttttaatttatttcatccagtttgttctccgggtgtggcctcagccctcagaacaatccgattcacgtagggaaatgttaaggacttctgcagctatgcgcaatgtggcattggggggccgggcaggtcctgcccatgtgtcccctcactctgtcagccagccgccctgggctgtctgtcaccagctatctgtcatctctctggggccctgggcctcagttcaacctggtggcaccagatgcaacctcactatggtatgctggccagcaccctctcctgggggtggcaggcacacagcagccccccagcactaaggccgtgtctctgaggacgtcatcggaggctgggcccctgggatgggaccagggatgggggatgggccagggtttacccagtgggacagaggagcaaggtttaaatttgttattgtgtattatgttgttcaaatgcattttgggggtttttaatctttgtgacaggaaagccctcccccttccccttctgtgtcacagttcttggtgactgtcccaccgggagcctccccctcagatgatctctccacggtagcacttgaccttttcgacgcttaacctttccgctgtcgccccaggccctccctgactccctgtgggggtggccatccctgggcccctccacgcctcctggccagacgctgccgctgccgctgcaccacggcgtttttttacaacattcaactttagtatttttactattataatataatatggaaccttccctccaaattcttcaataaaagttgcttttcaaaaaaaaaaaaaaaaaaaaaa

SEQ ID NO: 480 - DNA, 5877 bp, Homo sapiens
  adenylyl cyclase VI (ADCY6)
cggacggcggacggcgggcgggacggccaggacgcgcgggctcggaggaccgcgggacggccggccggccggccggagcccgcgggggcggcggggcgggggcccagggcaggcgcggagccgggccggcagcaacatgtcatggtttagtggcctcctggtccctaaagtggatgaacggaaaacagcctggggtgaacgcaatgggcagaagcgttcgcggcgccgtggcactcgggcaggtggcttctgcacgccccgctatatgagctgcctccgggatgcagagccacccagccccacccctgcgggcccccctcggtgcccctggcaggatgacgccttcatccggaggggcggcccaggcaagggcaaggagctggggctgcgggcagtggccctgggcttcgaggataccgaggtgacaacgacagcgggcgggacggctgaggtggcgcccgacgcggtgcccaggagtgggcgatcctgctggcgccgtctggtgcaggtgttccagtcgaagcagttccgttcggccaagctggagcgcctgtaccagcggtacttcttccagatgaaccagagcagcctgacgctgctgatggcggtgctggtgctgctcacagcggtgctgctggctttccacgccgcacccgcccgccctcagcctgcctatgtggcactgttggcctgtgccgccgccctgttcgtggggctcatggtggtgtgtaaccggcatagcttccgccaggactccatgtgggtggtgagctacgtggtgctgggcatcctggcggcagtgcaggtcgggggcgctctcgcagcagacccgcgcagcccctctgcgggcctctggtgccctgtgttctttgtctacatcgcctacacgctcctccccatccgcatgcgggctgccgtcctcagcggcctgggcctctccaccttgcatttgatcttggcctggcaacttaaccgtggtgatgccttcctctggaagcagctcggtgccaatgtgctgctgttcctctgcaccaacgtcattggcatctgcacacactatccagcagaggtgtctcagcgccaggcctttcaggagacccgcggttacatccaggcccggctccacctgcagcatgagaatcggcagcaggagcggctgctgctgtcggtattgccccagcacgttgccatggagatgaaagaagacatcaacacaaaaaaagaagacatgatgttccacaagatctacatacagaagcatgacaatgtcagcatcctgtttgcagacattgagggcttcaccagcctggcatcccagtgcactgcgcaggagctggtcatgaccctgaatgagctctttgcccggtttgacaagctggctgcggagaatcactgcctgaggatcaagatcttgggggactgttactactgtgtgtcagggctgccggaggcccgggccgaccatgcccactgctgtgtggagatgggggtagacatgattgaggccatctcgctggtacgtgaggtgacaggtgtgaatgtgaacatgcgcgtgggcatccacagcgggcgcgtgcactgcggcgtccttggcttgcggaaatggcagttcgatgtgtggtccaatgatgtgaccctggccaaccacatggaggcaggaggccgggctggccgcatccacatcactcgggcaacactgcagtacctgaacggggactacgaggtggagccaggccgtggtggcgagcgcaacgcgtacctcaaggagcagcacattgagactttcctcatcctgggcgccagccagaaacggaaagaggagaaggccatgctggccaagctgcagcggactcgggccaactccatggaagggctgatgccgcgctgggttcctgatcgtgccttctcccggaccaaggactccaaggccttccgccagatgggcattgatgattccagcaaagacaaccggggcacccaagatgccctgaaccctgaggatgaggtggatgagttcctgagccgtgccatcgatgcccgcagcattgatcagctgcggaaggaccatgtgcgccggtttctgctcaccttccagagagaggatcttgagaagaagtactcccggaaggtggatccccgcttcggagcctacgttgcctgtgccctgttggtcttctgcttcatctgcttcatccagcttctcatcttcccacactccaccctgatgcttgggatctatgccagcatcttcctgctgctgctaatcaccgtgctgatctgtgctgtgtactcctgtggttctctgttccctaaggccctgcaacgtctgtcccgcagcattgtccgctcacgggcacatagcaccgcagttggcatcttttccgtcctgcttgtgtttacttctgccattgccaacatgtacttcatcgggaacatgctgctgagtctcttggccagctctgtcttcctgcacatcagcagcatcgggaagttggccatgatctttgtcttggggctcatctatttggtgctgcttctgctgggtcccccagccaccatctttgacaactatgacctactgcttggcgtccatggcttggcttcttccaatgagacctttgatgggctggactgtccagctgcagggagggtggccctcaaatatatgacccctgtgattctgctggtgtttgcgctggcgctgtatctgcatgctcagcaggtggagtcgactgcccgcctagacttcctctggaaactacaggcaacaggggagaaggaggagatggaggagctacaggcatacaaccggaggctgctgcataacattctgcccaaggacgtggcggcccacttcctggcccgggagcgccgcaatgatgaactctactatcagtcgtgtgagtgtgtggctgttatgtttgcctccattgccaacttctctgagttctatgtggagctggaggcaaacaatgagggtgtcgagtgcctgcggctgctcaacgagatcatcgctgactttgatgagattatcagcgaggagcggttccggcagctggaaaagatcaagacgattggtagcacctacatggctgcctcagggctgaacgccagcacctacgatcaggtgggccgctcccacatcactgccctggctgactacgccatgcggctcatggagcagatgaagcacatcaatgagcactccttcaacaatttccagatgaagattgggctgaacatgggcccagtcgtggcaggtgtcatcggggctcggaagccacagtatgacatctgggggaacacagtgaatgtctctagtcgtatggacagcacgggggtccccgaccgaatccaggtgaccacggacctgtaccaggttctagctgccaagggctaccagctggagtgtcgaggggtggtcaaggtgaagggcaagggggagatgaccacctacttcctcaatgggggccccagcagttaacagggcccagccacaaattcagctgaagggaccaaggtgggcattgagtggactctgtgctcactgggtggagctgtggcagggggcactgagcctccagaccctgctaaccacaaaagggaacatcccagcaggctgtgcttggatcatgctcgtctgccctcaagctggaaaacaaggggctacctaccgagaggattatgcaagtgactttctttcttacttggggtagggctgttccctctccaatcttccagcctttgggagcaggggaggggtcagtagcagaagcagagggaggcctcttgcctgagggattaaaatggcagcttgccatgcctacccttccctgtctgtctgggcagcaggttcagggctgagcccttcttttccctcttttttcctgggaatattttgtacaatattttgtacaaagacaggcatgaggagtgcctattccatgcttgcctttgcaatacctgcatccccagcactggtcctgggcacttccccaccccagccaggtgtccctcctatgcacagagcagaggagggagaagctctggggagccagctttggccatatttcaggagaatgtttccatgtgccaaatcttagtcccatgatctgtccccaaaggggaacaaagggacctctgacagcttagatttagccccagttcctgcacgctccagggaacggggtgtctggcctcactggtactgtgaaaaatgctcagagagcaagcctgtgtgtggggatgtcaggtcaggagctggaagttcacctgcaggtgccaaagagcaggccggccagggctggggcagtgccagactctgatctgaggaccccgtcggggtccagatcaggtcactctgccccagtgctctcttgctgtctgctgacaagggggcatggagcatctcttcctcttctgttgccaaatagaaaagggtcagggcatggagaaaggtgaccctgatcccaaacctgccctcccaagtctctggtgttggggagggcccgtgtgtttgtgtaactgtgtgtgcatgttggtctttgtgtgcatatctgttttccaggtctatgtgagtccttgtgctcctgctcctcagctctccaccccaggttgcctctctcctgtgggcctctgtcttctgggaataaagcagggtttcctacttcaggggatgtagagagatgcccaggttgcacaggagtgggatggggtgtggtagcaaaaggagggagaggagtcctttttgtgccaaatccctaagtgccgttcgggggccatgtgtgcagcatgactctccctgtctgtggcagggacccaagcgcttgcttaagccccagtgctccatgccagcacttgaactgtctggggtttgatggacagaggctgaggaatttcctggcttccccagatagtgtcctgggacatggtatgctttggggctggggtagcatggaatccctctgaggacctggatactggtactacggggtggggaagaggaaccttaaacttggctttccccagccttcagcctgagtctagcatgtttctagctccccagtcccttgtgaagccttgagggctggcagaagggttaggaggttgaactctagattcccttcctgtctttgccttccttttacccctttccctgcaacctccttgactctggcctgaatttgttggtgcctcagtttctctgtctgtacctatttaagccaaaggcactagcctgaattttgcttgaagatcactttgtcttggaaatgactagagaggcagaggagaagggtttccagagttgctaggtttgggagtggaaggggcaggcagtgcacttgcccctcctcatgccccttctgacaccagctccctgtggaggcctggtttctgggtaatgcctcccttgggcatcttcatgcatcaaccaaatgggccatcaggtacttcattagtcatggcagaaggaggggaaaagacttgttttccagacagaaaatctactcccctgtccccagccatatccctggataggaagggataggaagagactacttggtgccatggggtaggggtgagggtataagtagatcagagtgggaagacctcagccttgggtggcttgtctctgcttcttgccaggtgggagggcctgtccacaccctggatccccgtaccacagtgccagccatgcccttcccctgggctaccattgtccctttcctcacccagttggtagaggagtcaggaggtgggaggccgtgggctttggttttataatgtaaccactgtgggggtgggggaggatggtgaaccatgtatttcagtgaaatatttaatatatttaaatatcaataaaatcaaactctttgt

SEQ ID NO: 481 - DNA, 3748 bp, Homo sapiens; identical to SEQ ID NO: 455
  FGF 1

SEQ ID NO: 482 - DNA, 6781 bp, Homo sapiens
  FGF 2 (FGFB)
cggccccagaaaacccgagcgagtagggggcggcgcgcaggagggaggagaactgggggcgcgggaggctggtgggtgtggggggtggagatgtagaagatgtgacgccgcggcccggcgggtgccagattagcggacgcggtgcccgcggttgcaacgggatcccgggcgctgcagcttgggaggcggctctccccaggcggcgtccgcggagacacccatccgtgaaccccaggtcccgggccgccggctcgccgcgcaccaggggccggcggacagaagagcggccgagcggctcgaggctgggggaccgcgggcgcggccgcgcgctgccgggcgggaggctggggggccggggccggggccgtgccccggagcgggtcggaggccggggccggggccgggggacggcggctccccgcgcggctccagcggctcggggatcccggccgggccccgcagggaccatggcagccgggagcatcaccacgctgcccgccttgcccgaggatggcggcagcggcgccttcccgcccggccacttcaaggaccccaagcggctgtactgcaaaaacgggggcttcttcctgcgcatccaccccgacggccgagttgacggggtccgggagaagagcgaccctcacatcaagctacaacttcaagcagaagagagaggagttgtgtctatcaaaggagtgtgtgctaaccgttacctggctatgaaggaagatggaagattactggcttctaaatgtgttacggatgagtgtttcttttttgaacgattggaatctaataactacaatacttaccggtcaaggaaatacaccagttggtatgtggcactgaaacgaactgggcagtataaacttggatccaaaacaggacctgggcagaaagctatactttttcttccaatgtctgctaagagctgattttaatggccacatctaatctcatttcacatgaaagaagaagtatattttagaaatttgttaatgagagtaaaagaaaataaatgtgtatagctcagtttggataattggtcaaacaattttttatccagtagtaaaatatgtaaccattgtcccagtaaagaaaaataacaaaagttgtaaaatgtatattctcccttttatattgcatctgctgttacccagtgaagcttacctagagcaatgatctttttcacgcatttgctttattcgaaaagaggcttttaaaatgtgcatgtttagaaacaaaatttcttcatggaaatcatatacattagaaaatcacagtcagatgtttaatcaatccaaaatgtccactatttcttatgtcattcgttagtctacatgtttctaaacatataaatgtgaatttaatcaattcctttcatagttttataattctctggcagttccttatgatagagtttataaaacagtcctgtgtaaactgctggaagttcttccacagtcaggtcaattttgtcaaacccttctctgtacccatacagcagcagcctagcaactctgctggtgatgggagttgtattttcagtcttcgccaggtcattgagatccatccactcacatcttaagcattcttcctggcaaaaatttatggtgaatgaatatggctttaggcggcagatgatatacatatctgacttcccaaaagctccaggatttgtgtgctgttgccgaatactcaggacggacctgaattctgattttataccagtctcttcaaaaacttctcgaaccgctgtgtctcctacgtaaaaaaagagatgtacaaatcaataataattacacttttagaaactgtatcatcaaagattttcagttaaagtagcattatgtaaaggctcaaaacattaccctaacaaagtaaagttttcaatacaaattctttgccttgtggatatcaagaaatcccaaaatattttcttaccactgtaaattcaagaagcttttgaaatgctgaatatttctttggctgctacttggaggcttatctacctgtacatttttggggtcagctctttttaacttcttgctgctctttttcccaaaaggtaaaaatatagattgaaaagttaaaacattttgcatggctgcagttcctttgtttcttgagataagattccaaagaacttagattcatttcttcaacaccgaaatgctggaggtgtttgatcagttttcaagaaacttggaatataaataattttataattcaacaaaggttttcacattttataaggttgatttttcaattaaatgcaaatttgtgtggcaggatttttattgccattaacatatttttgtggctgctttttctacacatccagatggtccctctaactgggctttctctaattttgtgatgttctgtcattgtctcccaaagtatttaggagaagccctttaaaaagctgccttcctctaccactttgctggaaagcttcacaattgtcacagacaaagatttttgttccaatactcgttttgcctctatttttcttgtttgtcaaatagtaaatgatatttgcccttgcagtaattctactggtgaaaaacatgcaaagaagaggaagtcacagaaacatgtctcaattcccatgtgctgtgactgtagactgtcttaccatagactgtcttacccatcccctggatatgctcttgttttttccctctaatagctatggaaagatgcatagaaagagtataatgttttaaaacataaggcatttgtctgccatttttcaattacatgctgacttcccttacaattgagatttgcccataggttaaacatggttagaaacaactgaaagcataaaagaaaaatctaggccgggtgcagtggctcatgcctatattccctgcactttgggaggccaaagcaggaggatcgcttgagcccaggagttcaagaccaacctggtgaaaccccgtctctacaaaaaaacacaaaaaatagccaggcatggtggcgtgtacatgtggtctcagatacttgggaggctgaggtgggagggttgatcacttgaggctgagaggtcaaggttgcagtgagccataatcgtgccactgcagtccagcctaggcaacagagtgagactttgtctcaaaaaaagagaaattttccttaataagaaaagtaatttttactctgatgtgcaatacatttgttattaaatttattatttaagatggtagcactagtcttaaattgtataaaatatcccctaacatgtttaaatgtccatttttattcattatgctttgaaaaataattatggggaaatacatgtttgttattaaatttattattaaagatagtagcactagtcttaaatttgatataacatctcctaacttgtttaaatgtccatttttattctttatgtttgaaaataaattatggggatcctatttagctcttagtaccactaatcaaaagttcggcatgtagctcatgatctatgctgtttctatgtcgtggaagcactggatgggggtagtgagcaaatctgccctgctcagcagtcaccatagcagctgactgaaaatcagcactgcctgagtagttttgatcagtttaacttgaatcactaactgactgaaaattgaatgggcaaataagtgcttttgtctccagagtatgcgggagacccttccacctcaagatggatatttcttccccaaggatttcaagatgaattgaaatttttaatcaagatagtgtgctttattctgttgtattttttattattttaatatactgtaagccaaactgaaataacatttgctgttttataggtttgaagaacataggaaaaactaagaggttttgtttttatttttgctgatgaagagatatgtttaaatatgttgtattgttttgtttagttacaggacaataatgaaatggagtttatatttgttatttctattttgttatatttaataatagaattagattgaaataaaatataatgggaaataatctgcagaatgtgggttttcctggtgtttccctctgactctagtgcactgatgatctctgataaggctcagctgctttatagttctctggctaatgcagcagatactcttcctgccagtggtaatacgattttttaagaaggcagtttgtcaattttaatcttgtggatacctttatactcttagggtattattttatacaaaagccttgaggattgcattctattttctatatgaccctcttgatatttaaaaaacactatggataacaattcttcatttacctagtattatgaaagaatgaaggagttcaaacaaatgtgtttcccagttaactagggtttactgtttgagccaatataaatgtttaactgtttgtgatggcagtattcctaaagtacattgcatgttttcctaaatacagagtttaaataatttcagtaattcttagatgattcagcttcatcattaagaatatcttttgttttatgttgagttagaaatgccttcatatagacatagtctttcagacctctactgtcagttttcatttctagctgctttcagggttttatgaattttcaggcaaagctttaatttacactaagcttaggaagtatggctaatgccaacggcagtttttttcttcttaattccacatgactgaggcatatatgatctctgggtaggtgagttgttgtgacaaccacaagcactttttttttttttaaagaaaaaaaggtagtgaatttttaatcatctggactttaagaaggattctggagtatacttaggcctgaaattatatatatttggcttggaaatgtgtttttcttcaattacatctacaagtaagtacagctgaaattcagaggacccataagagttcacatgaaaaaaatcaatttatttgaaaaggcaagatgcaggagagaggaagccttgcaaacctgcagactgctttttgcccaatatagattgggtaaggctgcaaaacataagcttaattagctcacatgctctgctctcacgtggcaccagtggatagtgtgagagaattaggctgtagaacaaatggccttctctttcagcattcacaccactacaaaatcatcttttatatcaacagaagaataagcataaactaagcaaaaggtcaataagtacctgaaaccaagattggctagagatatatcttaatgcaatccattttctgatggattgttacgagttggctatataatgtatgtatggtattttgatttgtgtaaaagttttaaaaatcaagctttaagtacatggacatttttaaataaaatatttaaagacaatttagaaaattgccttaatatcattgttggctaaatagaataggggacatgcatattaaggaaaaggtcatggagaaataatattggtatcaaacaaatacattgatttgtcatgatacacattgaatttgatccaatagtttaaggaataggtaggaaaatttggtttctatttttcgatttcctgtaaatcagtgacataaataattcttagcttattttatatttccttgtcttaaatactgagctcagtaagttgtgttaggggattatttctcagttgagactttcttatatgacattttactatgttttgactacctgactattaaaaataaatagtagatacaattttcataaagtgaagaattatataatcactgctttataactgactttattatatttatttcaaagttcatttaaaggctactattcatcctctgtgatggaatggtcaggaatttgttttctcatagtttaattccaacaacaatattagtcgtatccaaaataacctttaatgctaaactttactgatgtatatccaaagcttctcattttcagacagattaatccagaagcagtcataaacagaagaataggtggtatgttcctaatgatattatttctactaatggaataaactgtaatattagaaattatgctgctaattatatcagctctgaggtaatttctgaaatgttcagactcagtcggaacaaattggaaaatttaaatttttattcttagctataaagcaagaaagtaaacacattaatttcctcaacatttttaagccaattaaaaatataaaagatacacaccaatatcttcttcaggctctgacaggcctcctggaaacttccacatatttttcaactgcagtataaagtcagaaaataaagttaacataactttcactaacacacacatatgtagatttcacaaaatccacctataattggtcaaagtggttgagaatatattttttagtaattgcatgcaaaatttttctagcttccatcctttctccctcgtttcttctttttttgggggagctggtaactgatgaaatcttttcccaccttttctcttcaggaaatataagtggttttgtttggttaacgtgatacattctgtatgaatgaaacattggagggaaacatctactgaatttctgtaatttaaaatattttgctgctagttaactatgaacagatagaagaatcttacagatgctgctataaataagtagaaaatataaatttcatcactaaaatatgctattttaaaatctatttcctatattgtatttctaatcagatgtattactcttattatttctattgtatgtgttaatgattttatgtaaaaatgtaattgcttttcatgagtagtatgaataaaattgattagtttgtgttttcttgtctcccaaaaaaa

SEQ ID NO: 483 - DNA, 3165 bp, Homo sapiens
  FGF 4
ctggcgctcagggaggcgcgcactgctcctcagagtcccagctccagccgcgcgctttccgcccggctcgccgctccatgcagccggggtagagcccggcgcccgggggccccgtcgcttgcctcccgcacctcctcggttgcgcactcctgcccgaggtcggccgtgcgctcccgcgggacgccacaggcgcagctctgccccccagcttcccgggcgcactgaccgcctgaccgacgcacggccctcgggccgggatgtcggggcccgggacggccgcggtagcgctgctcccggcggtcctgctggccttgctggcgccctgggcgggccgagggggcgccgccgcacccactgcacccaacggcacgctggaggccgagctggagcgccgctgggagagcctggtggcgctctcgttggcgcgcctgccggtggcagcgcagcccaaggaggcggccgtccagagcggcgccggcgactacctgctgggcatcaagcggctgcggcggctctactgcaacgtgggcatcggcttccacctccaggcgctccccgacggccgcatcggcggcgcgcacgcggacacccgcgacagcctgctggagctctcgcccgtggagcggggcgtggtgagcatcttcggcgtggccagccggttcttcgtggccatgagcagcaagggcaagctctatggctcgcccttcttcaccgatgagtgcacgttcaaggagattctccttcccaacaactacaacgcctacgagtcctacaagtaccccggcatgttcatcgccctgagcaagaatgggaagaccaagaaggggaaccgagtgtcgcccaccatgaaggtcacccacttcctccccaggctgtgaccctccagaggacccttgcctcagcctcgggaagcccctgggagggcagtgccgagggtcaccttggtgcactttcttcggatgaagagtttaatgcaagagtaggtgtaagatatttaaattaattatttaaatgtgtatatattgccaccaaattatttatagttctgcgggtgtgttttttaattttctggggggaaaaaaagacaaaacaaaaaaccaactctgacttttctggtgcaacagtggagaatcttaccattggatttctttaacttgtcaaaagttgtcacgagtgtgctgctattctgtgttttaaaaaaaggtgacattggattccgatgtcatcccctgtagtatggcgtggagcatctctgtctggaaaggcccgcctgaggcttgggcagccagttcagggagctcccaggcttggctctcggctagcatcctcagaggcccactccctttgtgccctgttgctattaatcgggacatatcggtttacttcgggtacagaaagtgcggtgttgaagtcctcgctgccactctgtttttagatctgccaagactgacctttgaactttcctgtagtcaatcttcctcgatctaccagatgggagagacccttggacaactttataaactcctgtttgccttttttggatcagcgacagcccccatcgctgtgactattggggaaaagacgaagctctttcataaattccatggagaggaatcaatatcccactggaaggctagaaatggacaagatagtgtatttgcaatcacaaacaaaaccctagtgatgaaaaataatttgtgatggcagatgcttctgatggtgtgatagaatatgtttttgaaaacaaaccatcgaaccccccgccccacccccaaaacgggcttccctgtgtttagggagctttgggctagaactagctacgatttttaggtgaaatgtccttgtaattgtacaaagcacttggtgcagtgtttgcgtggagcagcctgctgctttctgatgcattccctgtttaagtgcgtttaacatctacctcacaagccctgaaaccccaggcaaaacccacagaaagctcatacccggtgcaggagtttgccatcccaagtggctttttttccatatgtagccaaaaaggattgcagatagcgtcggtgcgtcccattcgaaccttgtcacgtttgagctatctttaccctgtgatttacttttagtaagggtgatcatggtgaaaatatttgcagacagctgttacagtacactatatggtcaccaagtaaccttatatttttctttatatattttacaaatgtaacccctgtcattgaagcaaccgtggaagaggcagggtcggtgatgtttaaaaaaagttccgaggtgatggcaaacatttaattttaatgaatgactttttagagtttatacaaaatgaccttagcttgctaccagaaatgctccgaatgtttcgtcaagactttaatactctcctaggatgtttctgaactgtctcccgaattaactttatgggagtctacagacagcaagactggaaaatctgattggagtttttgtctttcacattccttttgaaaactctttgttcgaatgcaaatcatcgacttaaaatactattcttaaccaaggcctggaagaaagaagacacttgcaaagccgctaagacaggaccacacatcttaaactgctgttcctaccatgcactaaactgtttttaagttttaaaccacaccctaggctccaggagtgttcaggaaagatggtgtttgtaggtctccatgctgtttggcgttggggggtgtggagggatcatccgtcgactttctgaattttaatgtattcacttagtaacaaaccatgattgtcttaaatgccttaaattattatgagatttcttgtctcagagcccaatcagattgtcaggaattaacatgtgttaggtttgatcacccttgaccacttcttatagatatttcttcaacaaatcatgtgtgatgcctgtaggaacacaactgtacctttaaaatattgttttcatattgctgtgatggggattcgaggttcctgtatgtgccactgttttcagaatctgtagttttatacaggtgccgaccctcgttgtgatgtatgtgctgtgcacattgacatgctgaccgacaatgataagcgtttatcgtgtataaaaagacaccactggactggatgtacacaactgggaaaggaattaaaagctattaaaattgtgccttgaaa

SEQ ID NO: 484 - DNA, 5313 bp, Homo sapiens
  FGF 5
gctcgggtggcctctctcttcccctctccccttctcttccccgaggctatgtccacccggtgcggcgaggcgggcagagccagaggcacgcagccgcacaggggctacagagcccagaatcagccctacaagatgcacttaggacccccgcggctggaagaatgagcttgtccttcctcctcctcctcttcttcagccacctgatcctcagcgcctgggctcacggggagaagcgtctcgcccccaaagggcaacccggacccgctgccactgataggaaccctagaggctccagcagcagacagagcagcagtagcgctatgtcttcctcttctgcctcctcctcccccgcagcttctctgggcagccaaggaagtggcttggagcagagcagtttccagtggagcccctcggggcgccggaccggcagcctctactgcagagtgggcatcggtttccatctgcagatctacccggatggcaaagtcaatggatcccacgaagccaatatgttaagtgttttggaaatatttgctgtgtctcaggggattgtaggaatacgaggagttttcagcaacaaatttttagcgatgtcaaaaaaaggaaaactccatgcaagtgccaagttcacagatgactgcaagttcagggagcgttttcaagaaaatagctataatacctatgcctcagcaatacatagaactgaaaaaacagggcgggagtggtatgtggccctgaataaaagaggaaaagccaaacgagggtgcagcccccgggttaaaccccagcatatctctacccattttctgccaagattcaagcagtcggagcagccagaactttctttcacggttactgttcctgaaaagaaaaagccacctagccctatcaagccaaagattcccctttctgcacctcggaaaaataccaactcagtgaaatacagactcaagtttcgctttggataatattcctcttggccttgtgagaaaccattctttcccctcaggagtttctataggtgtcttcagagttctgaagaaaaattactggacacagcttcagctatacttacactgtattgaagtcacgtcatttgtttcaatgtgactgaaacaaaatgttttttgataggaaggaaactggaattctttgtactaatacagggagcacactccttcagttcagcaagacataaagccttttgctttatgcttgagggatatttagaactttgtattttcggaaagttaaataacagggactacgtatttttctgacttttacagattaacctgaaagaacatacatgatacatttttatttttggtttccaaagaatattttgatgcagataaaatattttgttaacttttgtttttttttgtttgttttcttaaaagtacctctgcattgagcatattttcttacttttattattttaattaatatgacataagcaatcattttatgctgtttatgaattataaatgtgtttatagctcatttgtaatatggaaatcttttacatttttcctattcactgcacttttttattgtttttatttctagccatacctcagataatatgtttagttttacattttaaaatgtttaaattctctttcacagcaccaaaggctcagcttggatttgtgtgtatgtgtatgtcaattcatgacattatgtggaatcctaaacctttggtggctgggatatgatgggttagaagcaaggagaaaatataaggactttttgatggaattaaatgtgggaggtaaggaaaaggatttagaggtaaaagtacactaagtttgcaacatttattgagatctaagtctgtcttgccttcatttctctttttatctcccccttgccctcattcttgaacagctggaggaatacattttattctgtccatgaagcatacactatgaaattcaagtgcttaaaaatacttctatgactctctgctatcccactgtatagatccacagggagcaaacacttagaaatgatagagaactgaaggagatcaatggtttaacagttatccatgccaagtcccattgtcagaaatattcttattactcagtcaaacactctttgagcttcccttcctaaaggtaaccaatccagtgaatagatgtgcccttttataaggaaacttctgatgtttattaaaaaaactggccttttgatagaggtaacttaatttgggaatttgttgtgttgaaatggcatttaatttcaacctaaatactgactgctggacataaatcacagaaaatttaacttaagaaaatttacaaaatttattctcaggtaatcattttaataaagttctgcaaaatacacgtttatcttacattcagaaatgtggcaaaaaaggcatagctaaaggctaaacatatggctttagtagtaacaaaagggttcatagaaacttcatggtttgcatttaaacatgtttaaagtgtacttataaactatttttttcttaaagcaaactatgatttattttggtgcacaaatacaaagtggaaacttaccaaaattgaactagctaccatataagcagattgctttaatttgatgggaaaatagtacacacatatatataacaaataatatattaaaaaacccatccatcaactaaaacattatatgtatacatcagtatagtgttttattataaagccaattatctgattaagcattctttccactgaatgcataatgtttaaatagcataaaatgaaatgctacaaaaattgaactaatttatactttaaagtatttctgggttaaatgaaacaatgaaattttttagtatgttcaactctcatccaaatggcatatgaccctgtttacacagcctaaagctaaaaatattactctagtttattctaatctattgttaagtattgtgcactgtataccaagttcttagggcacatgaaaaattttagctgccaaacaggaactagtaaacatatgttcctaataagtgaagggaaagataataatgatggtcaacaataagccacgtcaatgcataagttgtataggctaaatgttgcttgtaggctacattaaactcaaatgtaatagtttatcttatactcctggtttgatttgattagcatattaacgtgaaagtaggatagctactaaatatatattatgcaagtcaggaatcattaatttcaaaatttaaagccatgctaaaattaaaaagaaaatattaaattacacaattacacttgtctttactggccatacaaaatgattttttttttttttttgagacagagtcttgctctgtcaccaggctggagtgcagtggcatgatctcggctcactgcaacctccaactccctggtttaagggattctcctgcctcagcctcccaagtagctgggattacagactcatgccaccacgccagctaatttttgtatttttagtagagacggggtttcaccatgttggtcaggatggtctcaatcctggcctcttgatagtcctgacctcatgatctgcccacctcggcctccccaaagtgctgggattacaggtacaatgatgtataattaatgcttagtgaagcataaagttacctacatcaattaattaaatgaacttatgtacagaaaacatgtataaatataagtctatactaatgcttacaactttctaagagggttcttgcttatgtagctttttattattttaagtaactagaaccaccaaatatcaaataaaattatttggttatggttatgttcatctaaacacaacaataacttttatattaatatttaggagtctattttgtctataggtgacaaacatctccagactaacatgtcagttttatcaattatattatgtttaattatttaagatttctttatgtggaacatctatagagataaatagaaattttcaataagatgtagtaacactgtgatttatctttcaagagtctctcttcacttccttctaaagagactaatttgagagtacaggtgcatattaattttcttggttctttcagctgaattatattggtccagaagttcaaaatcatgtgacaataataagggatactgacagaagttatttccaagtttgtgtatatattataaaaattacatatataaaactaaggcttttatttctgttatttttaagcttttatttcttgtagctaaaaataaaacatcataaatctggtaggtaaatttcttattaaatcaatcttgaaatagaaaatgtaataactttcttaccattaacattttttacccttccatagaagggagggaataaatcatgacttatcccattttcaataacaaaacgaaactatggcactaaccaaaaacttgcattctggcataatttttacagttgcagagaattgtttctgggctcattaaaaaaagtagtattgcagacattgctgcaatgggaagcagacaataacttcttaaaggaattctacacctcctttaagatttacttaattgctacatctaaattctgataatttaaaatccattttaggtgataaaattttttaaaagttttgaaggaaacctctggataaatggacaaggcctaatttttttttgtagtcaatccaactgtactggccaatttttgaaataagattatatgattaggtattagcagagacaaagagttacctcctccatcttactctgccctatttgaaagtctcaggggagaaaagggaacaagatgctgatccaacctgagtggagtcaggtgaggcatctttacatctaagaatttttttttaaattttattattattatacttcaagttctagggtacatgtccacaatgcacatgtctgtcacacatgcacacatgtgccatgctggtgtgctgcacccaccaacctgtcatccagcattaggtatatctcctaatgctatccctcccctctccacccaccccacagcaggccccggtatgtgatgttccccttcgtgtgtccatgtgttcttattgttcaattcccacctatgagtgagaatatgtggtgtttggtttttggtccttgcaatagtttgctgagaatgatggtttccagcttcatccatgtccctacaaagaacatgaactcatcattttttatggctgcatagtattccatggtgtatatgtgccacattttcttaatccagtctatcattgttggacatttgggttggttccaagtctttgctattgtgaatagtgctgcaataaacatatgtgtgcatgtgtcttta

SEQ ID NO: 485 - DNA, 5834 bp, Homo sapiens
  HGF
aggcactgactccgaacaggattctttcacccaggcatctcctccagagggatccgccagcccgtccagcagcaccatgtgggtgaccaaactcctgccagccctgctgctgcagcatgtcctcctgcatctcctcctgctccccatcgccatcccctatgcagagggacaaaggaaaagaagaaatacaattcatgaattcaaaaaatcagcaaagactaccctaatcaaaatagatccagcactgaagataaaaaccaaaaaagtgaatactgcagaccaatgtgctaatagatgtactaggaataaaggacttccattcacttgcaaggcttttgtttttgataaagcaagaaaacaatgcctctggttccccttcaatagcatgtcaagtggagtgaaaaaagaatttggccatgaatttgacctctatgaaaacaaagactacattagaaactgcatcattggtaaaggacgcagctacaagggaacagtatctatcactaagagtggcatcaaatgtcagccctggagttccatgataccacacgaacacagctttttgccttcgagctatcggggtaaagacctacaggaaaactactgtcgaaatcctcgaggggaagaagggggaccctggtgtttcacaagcaatccagaggtacgctacgaagtctgtgacattcctcagtgttcagaagttgaatgcatgacctgcaatggggagagttatcgaggtctcatggatcatacagaatcaggcaagatttgtcagcgctgggatcatcagacaccacaccggcacaaattcttgcctgaaagatatcccgacaagggctttgatgataattattgccgcaatcccgatggccagccgaggccatggtgctatactcttgaccctcacacccgctgggagtactgtgcaattaaaacatgcgctgacaatactatgaatgacactgatgttcctttggaaacaactgaatgcatccaaggtcaaggagaaggctacaggggcactgtcaataccatttggaatggaattccatgtcagcgttgggattctcagtatcctcacgagcatgacatgactcctgaaaatttcaagtgcaaggacctacgagaaaattactgccgaaatccagatgggtctgaatcaccctggtgttttaccactgatccaaacatccgagttggctactgctcccaaattccaaactgtgatatgtcacatggacaagattgttatcgtgggaatggcaaaaattatatgggcaacttatcccaaacaagatctggactaacatgttcaatgtgggacaagaacatggaagacttacatcgtcatatcttctgggaaccagatgcaagtaagctgaatgagaattactgccgaaatccagatgatgatgctcatggaccctggtgctacacgggaaatccactcattccttgggattattgccctatttctcgttgtgaaggtgataccacacctacaatagtcaatttagaccatcccgtaatatcttgtgccaaaacgaaacaattgcgagttgtaaatgggattccaacacgaacaaacataggatggatggttagtttgagatacagaaataaacatatctgcggaggatcattgataaaggagagttgggttcttactgcacgacagtgtttcccttctcgagacttgaaagattatgaagcttggcttggaattcatgatgtccacggaagaggagatgagaaatgcaaacaggttctcaatgtttcccagctggtatatggccctgaaggatcagatctggttttaatgaagcttgccaggcctgctgtcctggatgattttgttagtacgattgatttacctaattatggatgcacaattcctgaaaagaccagttgcagtgtttatggctggggctacactggattgatcaactatgatggcctattacgagtggcacatctctatataatgggaaatgagaaatgcagccagcatcatcgagggaaggtgactctgaatgagtctgaaatatgtgctggggctgaaaagattggatcaggaccatgtgagggggattatggtggcccacttgtttgtgagcaacataaaatgagaatggttcttggtgtcattgttcctggtcgtggatgtgccattccaaatcgtcctggtatttttgtccgagtagcatattatgcaaaatggatacacaaaattattttaacatataaggtaccacagtcatagctgaagtaagtgtgtctgaagcacccaccaatacaactgtcttttacatgaagatttcagagaatgtggaatttaaaatgtcacttacaacaatcctaagacaactactggagagtcatgtttgttgaaattctcattaatgtttatgggtgttttctgttgttttgtttgtcagtgttattttgtcaatgttgaagtgaattaaggtacatgcaagtgtaataacatatctcctgaagatacttgaatggattaaaaaaacacacaggtatatttgctggatgataaagatttcatgggaaaaaaaatcaattaatctgtctaagctgctttctgatgttggtttcttaataatgagtaaaccacaaattaaatgttattttaacctcaccaaaacaatttataccttgtgtccctaaattgtagccctatattaaattatattacatttcatatgctatatgttatagttcattcatttctcttcaccatgtatcctgcaatactggtacacgaacacactttttacaaaaccacatacccatgtacacatgcctaggtacacatgtgcatgcactacagtttaaattatggtgtacctaatgtaacccctaaatattttagaagtatgtacctatagttttacctcaaaaaaaccagaaatctctaaagaccagtagaaatattaaaaaatgatgcaagatcaaaatgattagctaattctccatacataatctgcagatgatcttctttggttggcatttcaggtgtggccatcacccagagttaaataacacctaatctaggtgtttacatgtattcattatcctagttatttcatgtagtttctaattcttaaaggaaagagggtaatagttctatttgtgtaatttgtttcctccaaacttaaggccacttatttacacaagatatttgtagatctattttcctaaagcatttcttaagtgctcagatcagtatctaattgaagaagtttaaaagtgttttggtcattaaaaatgtacttaaataggttaaatctaagccttgctgctgtgattggcttctagctcactgcctttaaattttaaaaaatttaagaggaaaatttccaagtctccaaagttttataaatacccttcatcaagtcatgcattaaagtatatattggagaaaaaaataaaaatacttttctcaacctggaagattttagcctaataaagcttttttgaagtaaaagacaacttgtaaaaggaaagaaactagtttgtctcaactctgtattcatttattttttttttgaagtagagtggaatctgttgaatcagatattttatcaagatatgtttattttttcttatttcattttacaaagttcactcctaatgccatatgtaacagacatttaaattttgtgttctgtataacagccaaattatcatatttatcattgtatttgtcatgcttagctaaagatcatgtatttgttgagaaatagaataacaaaaagtaataggataggctttgaatttttgcagaaatcttcctgtacaaaacacctttaaaaataattttttgaatggtgtgaatccagtagtcccatttctctgacttagttttcttgagtgatttttatcaaggccaagtccccaaacaattccctaccagctctttagagtactgttcaatctggactaaaatggttttaagtttatggagagcttagtccacagaatatagggcggcgagtccagaaatgcttatacaatttttttttcataataagatatgtgctggcatcaagaaacttaaagtggaagcaaaaagacatccaactagttgctggtctctatcatcttatctgatggtatttctattttccttatataatacaccattttagtaagaactcctagaaatttcaagagcatattgccaaaatataaagtatatttcatagtttcttctggctgaaccagtgaaattttattattgcatattaatgatatttgtaaaacttttataaaaattgtcataattttaaatactcacattttaaaaatacttctttaatgactcttcctctaaatttcctggaaatacagataaagattagctagatacaagatacagctaagtatttagacattttgaggctagtatttttcattttattaaaggctaaaaacaataccaccaataaatcatcaaacaaaccgtacaaagtaattctctctttgggaggctcctttcgtgatagagggacatgggtggaattgacaatgaaacttagatgaacaaggtccatgttattttaggtggtagaacagggtagagtcatgtcattatttgctggtggaagacactatttaccaggtgttctttgctgaataaatcattaaacatttttaaaaatccaacaatccactttattttgtgtcattgacaaaaggatcttttaaatcagaaggtttcaatgcaatttttggtttggctgtttgaataatggttatgtactgttataattgtagacattttctcacgtctaccaggaattgaagtgtaaaactaaaatatttttcataatgcctctgccgtgcagaaggaatgataatccttttgtatacttctttaattttattgtaaaatgtgtaatgacttttacctatatgctgtgggcaggtcctcagtaaaatctattgagtcaatttctagtattaacaggcttttgcttgctatctaagtgtttcaaattatgggaagtgtgagacactggaaggcaagaaaattaacaataatggcatgtgatagcaaaattgtatttcacttattcctgtgaatatttcttgttggtaccaatggtactgtacaaagtgaatgttatagccacaacattctcttgaaaagaacactgtcaagaagtgggaaattgctgtcaggcatttcattgttgtttttaaacttttttaaaagaaatactggttttgcaatatagagatcatgtggtaaagaattttaataagatcttatactaaaaagccttaaatcaatttattgagattcaaaaaatactattataattaattacatcccatacatataggcaaactcatttaaaaaataaaactaattttggtaaaagtacatggcctttgtttttaaaatacataattttaaaataaatcacttgtcatgataaagtccaaaaagaagttatcattcaacattcaactaaggttggagctaagaatttactaatacaaaaaaagttaaaattttttggaccatatatatcttgacagtgtaacttttaagtaggttcatttccatttgcacagaaagtttctgtctttaggaaactgaaaatgaaatactgtggatgctatgactgtttgtcttgtatgtaaataggaaattaataagctgcctattgagtggtatagctgtatgcttacccaaaaaagggaacactgtggttatgacttgtattataaactttctgtagttaataaagttgttatttttataaccatgattatattattattattaataaaatattttatcaaaa

SEQ ID NO: 486 - DNA, 4230 bp, Homo sapiens
  Ang1 (ANGPT1; angiopoietin1)
agcagatctgcagcagatagggtagaggaaagggtctagaatatgtacacgcagctgactcaggcaggctccatgctgaacggtcacacagagaggaaacaataaatctcagctactatgcaataaatatctcaagttttaacgaagaaaaacatcattgcagtgaaataaaaaattttaaaattttagaacaaagctaacaaatggctagttttctatgattcttcttcaaacgctttctttgagggggaaagagtcaaacaaacaagcagttttacctgaaataaagaactagttttagaggtcagaagaaaggagcaagttttgcgagaggcacggaaggagtgtgctggcagtacaatgacagttttcctttcctttgctttcctcgctgccattctgactcacatagggtgcagcaatcagcgccgaagtccagaaaacagtgggagaagatataaccggattcaacatgggcaatgtgcctacactttcattcttccagaacacgatggcaactgtcgtgagagtacgacagaccagtacaacacaaacgctctgcagagagatgctccacacgtggaaccggatttctcttcccagaaacttcaacatctggaacatgtgatggaaaattatactcagtggctgcaaaaacttgagaattacattgtggaaaacatgaagtcggagatggcccagatacagcagaatgcagttcagaaccacacggctaccatgctggagataggaaccagcctcctctctcagactgcagagcagaccagaaagctgacagatgttgagacccaggtactaaatcaaacttctcgacttgagatacagctgctggagaattcattatccacctacaagctagagaagcaacttcttcaacagacaaatgaaatcttgaagatccatgaaaaaaacagtttattagaacataaaatcttagaaatggaaggaaaacacaaggaagagttggacaccttaaaggaagagaaagagaaccttcaaggcttggttactcgtcaaacatatataatccaggagctggaaaagcaattaaacagagctaccaccaacaacagtgtccttcagaagcagcaactggagctgatggacacagtccacaaccttgtcaatctttgcactaaagaaggtgttttactaaagggaggaaaaagagaggaagagaaaccatttagagactgtgcagatgtatatcaagctggttttaataaaagtggaatctacactatttatattaataatatgccagaacccaaaaaggtgttttgcaatatggatgtcaatgggggaggttggactgtaatacaacatcgtgaagatggaagtctagatttccaaagaggctggaaggaatataaaatgggttttggaaatccctccggtgaatattggctggggaatgagtttatttttgccattaccagtcagaggcagtacatgctaagaattgagttaatggactgggaagggaaccgagcctattcacagtatgacagattccacataggaaatgaaaagcaaaactataggttgtatttaaaaggtcacactgggacagcaggaaaacagagcagcctgatcttacacggtgctgatttcagcactaaagatgctgataatgacaactgtatgtgcaaatgtgccctcatgttaacaggaggatggtggtttgatgcttgtggcccctccaatctaaatggaatgttctatactgcgggacaaaaccatggaaaactgaatgggataaagtggcactacttcaaagggcccagttactccttacgttccacaactatgatgattcgacctttagatttttgaaagcgcaatgtcagaagcgattatgaaagcaacaaagaaatccggagaagctgccaggtgagaaactgtttgaaaacttcagaagcaaacaatattgtctcccttccagcaataagtggtagttatgtgaagtcaccaaggttcttgaccgtgaatctggagccgtttgagttcacaagagtctctacttggggtgacagtgctcacgtggctcgactatagaaaactccactgactgtcgggctttaaaaagggaagaaactgctgagcttgctgtgcttcaaactactactggaccttattttggaactatggtagccagatgataaatatggttaatttcatgtaaaacagaaaaaaagagtgaaaaagagaatatacatgaagaatagaaacaagcctgccataatcctttggaaaagatgtattataccagtgaaaaggtgttatatctatgcaaacctactaacaaattatactgttgcacaattttgataaaaatttagaacagcattgtcctctgagttggttaaatgttaatggatttcagaagcctaattccagtatcatacttactagttgatttctgcttacccatcttcaaatgaaaattccatttttgtaagccataatgaactgtagtacatggacaataagtgtgtggtagaaacaaactccattactctgatttttgatacagttttcagaaaaagaaatgaacataatcaagtaaggatgtatgtggtgaaaacttaccacccccatactatggttttcatttactctaaaaactgattgaatgatatataaatatatttatagcctgagtaaagttaaaagaatgtaaaatatatcatcaagttcttaaaataatatacatgcatttaatatttcctttgatattatacaggaaagcaatattttggagtatgttaagttgaagtaaaagcaagtactctggagcagttcattttacagtatctacttgcatgtgtatacatacatgtaacttcattattttaaaaatatttttagaactccaatactcaccctgttatgtcttgctaatttaaattttgctaattaactgaaacatgcttaccagattcacactgttccagtgtctataaaagaaacactttgaagtctataaaaaataaaataattataaatatcattgtacatagcatgtttatatctgcaaaaaacctaatagctaattaatctggaatatgcaacattgtccttaattgatgcaaataacacaaatgctcaaagaaatctactatatcccttaatgaaatacatcattcttcatatatttctccttcagtccattcccttaggcaatttttaatttttaaaaattattatcaggggagaaaaattggcaaaactattatatgtaagggaaatatatacaaaaagaaaattaatcatagtcacctgactaagaaattctgactgctagttgccataaataactcaatggaaatattcctatgggataatgtattttaagtgaatttttggggtgcttgaagttactgcattattttatcaagaagtcttctctgcctgtaagtgtccaaggttatgacagtaaacagtttttattaaaacatgagtcactatgggatgagaaaattgaaataaagctactgggcctcctctcataaaagagacagttgttggcaaggtagcaataccagtttcaaacttggtgacttgatccactatgccttaatggtttcctccatttgagaaaataaagctattcacattgttaagaaaaatactttttaaagtttaccatcaagtcttttttatatttatgtgtctgtattctacccctttttgccttacaagtgatatttgcaggtattataccatttttctattcttggtggcttcttcatagcaggtaagcctctccttctaaaaacttctcaactgttttcatttaagggaaagaaaatgagtattttgtccttttgtgttcctacagacactttcttaaaccagtttttggataaagaatactatttccaaactcatattacaaaaacaaaataaaataataaaaaaagaaagcatgatatttactgttttgttgtctgggtttgagaaatgaaatattgtttccaattatttataataaatcagtataaaatgttttatgattgttatgtgtattatgtaatacgtacatgtttatggcaatttaacatgtgtattcttttaattgtttcagaataggataattaggtattcgaattttgtctttaaaattcatgtggtttctatgcaaagttcttcatatcatcacaacattatttgatttaaataaaattgaaagtaatatttgtgcaa

SEQ ID NO: 487 - DNA, 1650 bp, Homo sapiens
  MGP1 (Matrix Gla Protein)
gtaggagcctctctccctactgctgctacacaagaccctgagactgacctgcaggacgaaaccatgaagagcctgatccttcttgccatcctggccgccttagcggtagtaactttgtgttatgaatcacatgaaagcatggaatcttatgaacttaatcccttcattaacaggagaaatgcaaataccttcatatcccctcagcagagatggagagctaaagtccaagagaggatccgagaacgctctaagcctgtccacgagctcaatagggaagcctgtgatgactacagactttgcgaacgctacgccatggtttatggatacaatgctgcctataatcgctacttcaggaagcgccgagggaccaaatgagactgagggaagaaaaaaaatctctttttttctggaggctggcacctgattttgtatccccctgtagcagcattacagaaatacataggcttatatacaatgcttctttcctgtatattctcttgtctggctgcacccctttttcccgcccccagattgataagtaatgaaagtgcactgcagtgagggtcaaaggagagtcaacatatgtgattgttccataataaacttctggtgtgatactttcatcttgtaaatctgctttcttttgggaagatattgagatatttaaatcatggcccaccttacccaaaataggagattctgttcatctcatatctagtattaattagaaaaataactacataaaaagaaggaagctaagaaggcactcactcagccataaattctctaaaccctctctaccttggaatccgtgaatggaatctggtatgttttttgcaggattttcctattgtaaattgtggcaaatacagggctcccttcatttgcttttcatctcttatgcatcaaagtcaaaaacatttctgaatcaagataatctagaagagaaaaaaggaggaaaaggaaaagagaaagcagaagggacaaataaaagcaattggcaaaaactgtcaataatagtttatacacttaactatatcaataatcacattatatgtaaatagtctaaacaatccaattattttttacttctacttatgttatatttttacttctacatttgttaaaggttccacgctacatttttactattcttgctttaaataattttaataatttcttttaaagtttagataataagaaaatatcccgggccaggcacagtggccacacctgtaatctcagtagccatgaccataccaatgcactccagcctgtgaaacagagtgagactctgtctctacagaaaaataaaaaagaaaagaaagaaaagatctcatatatttacccatgtaattttcatttcctgttttcttcattcttctttccatctggtgtcacttcctttctgcctgacgacttcctttaacgttttttatagttcaggtctgcaggattctttaagttttgtatgcttgtttttattcttgaaagatattttcactgtatattgaatcccaagttgccacgtttcttttaattattttaaggtattccactgaattctagcttgcacaatttttcgatataaaatttgttgtaattcttacctttgttccactgtgtatactgcatcttttatctctggct

SEQ ID NO: 488 - DNA, 1775 bp, Homo sapiens
  OMG (oligodendrocyte myelin glycoprotein)
agaaacagttccgactctacagaacaagacgacctttaagtttcccagagaaaatgagatgctgatgttgaagacgacaccacggctttgatggaatatcagatattgaaaatgtctctctgcctgttcatccttctgtttctcacacctggtattttatgcatttgtcctctccaatgtatatgcacagagaggcacaggcatgtggactgttcaggcagaaacttgtctacattaccatctggactgcaagagaatattatacatttaaacctgtcttataaccactttactgatctgcataaccagttaacccaatataccaatctgaggaccctggacatttcaaacaacaggcttgaaagcctgcctgctcacttacctcggtctctgtggaacatgtctgctgctaacaacaacattaaacttcttgacaaatctgatactgcttatcagtggaatcttaaatatctggatgtttctaagaacatgctggaaaaggttgtcctcattaaaaatacactaagaagtctcgaggttctcaacctcagtagtaacaaactttggacagttccaaccaacatgccctccaaactacatatcgtggacctgtctaataattctttgacacaaattcttccaggtacattaataaacctgacaaatctcacacatctttacctgcacaacaataagttcacattcattccagaccaatcttttgaccaactctttcagttgcaagagataaccctttacaataacaggtggtcatgtgaccacaaacaaaacattacttacttactgaagtggatgatggaaacaaaagcccatgtgatagggactccatgttctacccaaatatcatctttaaaggaacataacatgtatcccacaccttctggatttacctcaagcttattcactgtaagtgggatgcagacagtggacaccattaactctctgagtgtggtaactcaacccaaagtgaccaaaatacccaaacaatatcgaacaaaggaaacaacgtttggtgccactctaagcaaagacaccacctttactagcactgataaggcttttgtgccctatccagaagatacatccacagagactatcaattcacatgaagcagcagctgcaactctaactattcatctccaagatggaatggtcacaaacacaagcctcactagctcaacaaaatcatccccaacacccatgaccctaagtatcactagtggcatgccaaataatttctctgaaatgcctcaacaaagcacaacccttaacttatggagggaagagacaaccacaaatgtaaagactccattaccttctgtggcaaatgcttggaaagtaaatgcttcatttctcttattgctcaatgttgtggtcatgctggctgtctgagggtctgcattttctgaaactaatgaaagcactcctccctgatgtacagttgggaaaatatgtccatatctaaccagtgattcgagctatatttaagtattcaagaaagccagtcttaacatttctaactctgatgtaaatgaagtaacttgtcttaaataaaagaaatgcacaatgtcttggtacttgctgctattttactgtcttaattaagtaaactaatgagtttcttttataaaaaaaatgaaatgttttaaggcttcaatttattgcacaaaatataaagcatctaaactttaatatgtattttatgtatgtttacactgtcaaacatctggaaaataaaaggtctatgctcataa

SEQ ID NO: 489 - DNA, 1405 bp, Homo sapiens
  G-CSF (CSF3; Colony Stimulating Factor 3)
agcccggagcctgcagcccagccccacccagacccatggctggacctgccacccagagccccatgaagctgatggccctgcagctgctgctgtggcacagtgcactctggacagtgcaggaagccacccccctgggccctgccagctccctgccccagagcttcctgctcaagtgcttagagcaagtgaggaagatccagggcgatggcgcagcgctccaggagaagctggtgagtgaggcaggctgcttgagccaactccatagcggccttttcctctaccaggggctcctgcaggccctggaagggatctcccccgagttgggtcccaccttggacacactgcagctggacgtcgccgactttgccaccaccatctggcagcagatggaagaactgggaatggcccctgccctgcagcccacccagggtgccatgccggccttcgcctctgctttccagcgccgggcaggaggggtcctggttgcctcccatctgcagagcttcctggaggtgtcgtaccgcgttctacgccaccttgcccagccctgagccaagccctccccatcccatgtatttatctctatttaatatttatgtctatttaagcctcatatttaaagacagggaagagcagaacggagccccaggcctctgtgtccttccctgcatttctgagtttcattctcctgcctgtagcagtgagaaaaagctcctgtcctcccatcccctggactgggaggtagataggtaaataccaagtatttattactatgactgctccccagccctggctctgcaatgggcactgggatgagccgctgtgagcccctggtcctgagggtccccacctgggacccttgagagtatcaggtctcccacgtgggagacaagaaatccctgtttaatatttaaacagcagtgttccccatctgggtccttgcacccctcactctggcctcagccgactgcacagcggcccctgcatccccttggctgtgaggcccctggacaagcagaggtggccagagctgggaggcatggccctggggtcccacgaatttgctggggaatctcgtttttcttcttaagacttttgggacatggtttgactcccgaacatcaccgacgcgtctcctgtttttctgggtggcctcgggacacctgccctgcccccacgagggtcaggactgtgactctttttagggccaggcaggtgcctggacatttgccttgctggacggggactggggatgtgggagggagcagacaggaggaatcatgtcaggcctgtgtgtgaaaggaagctccactgtcaccctccacctcttcaccccccactcaccagtgtcccctccactgtcacattgtaactgaacttcaggataataaagtgtttgcctcca

SEQ ID NO: 490 - DNA, 2811 bp, Homo sapiens; identical to SEQ ID NO: 456
  PDGF (PDGFA)

SEQ ID NO: 491 - DNA, 7277 bp, Homo sapiens; identical to SEQ ID NO: 453
  IGF1

SEQ ID NO: 492 - DNA, 5580 bp, Homo sapiens
  IGF2
gcctgctctccggcggagctgcgtgaggcccggccggccccggccccccccttccggccgcccccgcctcctggcccacgcctgcccgcgctctgcccaccagcgcctccatcgggcaaggcggccccgcgtcgacgccgcccgctgcctcgctgctgactcccgtcccgggcgccgtccgcggggtcgcgctccgccgggcctgcggattccccgccgcctcctcttcatctacctcaactccccccatccccgcttcgcccgaggaggcggttccccccgcaggcagtccggctcgcaggccgccggcgttgtcacccccccccgcgctccccctccagccctccccccggcgcgcagcctcgggccgctcccctttccgcgctgcgtcccggagcggccccggtgccgccaccgcctgtccccctcccgaggcccgggctcgcgacggcagagggctccgtcggcccaaaccgagctgggcgcccgcggtccgggtgcagcctccactccgccccccagtcaccgcctcccccggcccctcgacgtggcgcccttccctccgcttctctgtgctccccgcgcccctcttggcgtctggccccggcccccgctctttctcccgcaaccttcccttcgctccctcccgtcccccccagctcctagcctccgactccctccccccctcacgcccgccctctcgccttcgccgaaccaaagtggattaattacacgctttctgtttctctccgtgctgttctctcccgctgtgcgcctgcccgcctctcgctgtcctctctccccctcgccctctcttcggcccccccctttcacgttcactctgtctctcccactatctctgcccccctctatccttgatacaacagctgacctcatttcccgataccttttcccccccgaaaagtacaacatctggcccgccccagcccgaagacagcccgtcctccctggacaatcagacgaattctccccccccccccaaaaaaaagccatccccccgctctgccccgtcgcacattcggcccccgcgactcggccagagcggcgctggcagaggagtgtccggcaggagggccaacgcccgctgttcggtttgcgacacgcagcagggaggtgggcggcagcgtcgccggcttccagacaccaatgggaatcccaatggggaagtcgatgctggtgcttctcaccttcttggccttcgcctcgtgctgcattgctgcttaccgccccagtgagaccctgtgcggcggggagctggtggacaccctccagttcgtctgtggggaccgcggcttctacttcagcaggcccgcaagccgtgtgagccgtcgcagccgtggcatcgttgaggagtgctgtttccgcagctgtgacctggccctcctggagacgtactgtgctacccccgccaagtccgagagggacgtgtcgacccctccgaccgtgcttccggacaacttccccagataccccgtgggcaagttcttccaatatgacacctggaagcagtccacccagcgcctgcgcaggggcctgcctgccctcctgcgtgcccgccggggtcacgtgctcgccaaggagctcgaggcgttcagggaggccaaacgtcaccgtcccctgattgctctacccacccaagaccccgcccacgggggcgcccccccagagatggccagcaatcggaagtgagcaaaactgccgcaagtctgcagcccggcgccaccatcctgcagcctcctcctgaccacggacgtttccatcaggttccatcccgaaaatctctcggttccacgtccccctggggcttctcctgacccagtccccgtgccccgcctccccgaaacaggctactctcctcggccccctccatcgggctgaggaagcacagcagcatcttcaaacatgtacaaaatcgattggctttaaacacccttcacataccctccccccaaattatccccaattatccccacacataaaaaatcaaaacattaaactaacccccttcccccccccccacaacaaccctcttaaaactaattggctttttagaaacaccccacaaaagctcagaaattggctttaaaaaaaacaaccaccaaaaaaaatcaattggctaaaaaaaaaaagtattaaaaacgaattggctgagaaacaattggcaaaataaaggaatttggcactccccacccccctctttctcttctcccttggactttgagtcaaattggcctggacttgagtccctgaaccagcaaagagaaaagaaggaccccagaaatcacaggtgggcacgtcgctgctaccgccatctcccttctcacgggaattttcagggtaaactggccatccgaaaatagcaacaacccagactggctcctcactcccttttccatcactaaaaatcacagagcagtcagagggacccagtaagaccaaaggaggggaggacagagcatgaaaaccaaaatccatgcaaatgaaatgtaattggcacgaccctcacccccaaatcttacatctcaattcccatcctaaaaagcactcatactttatgcatccccgcagctacacacacacaacacacagcacacgcatgaacacagcacacacacgagcacagcacacacacaaacgcacagcacacacagcacacagatgagcacacagcacacacacaaacgcacagcacacacacgcacacacatgcacacacagcacacaaacgcacggcacacacacgcacacacatgcacacacagcacacacacaaacgcacagcacacacaaacgcacagcacacacgcacacacagcacacacacgagcacacagcacacaaacgcacagcacacgcacacacatgcacacacagcacacacactagcacacagcacacacacaaagacacagcacacacatgcacacacagcacacacacgcgaacacagcacacacgaacacagcacacacagcacacacacaaacacagcacacacatgcacacagcacacgcacacacagcacacacatgaacacagcacacagcacacacatgcacacacagcacacacgcatgcacagcacacatgaacacagcacacacacaaacacacagcacacacatgcacacacagcacacacactcatgcgcagcacatacatgaacacagctcacagcacacaaacacgcagcacacacgttgcacacgcaagcacccacctgcacacacacatgcgcacacacacgcacacccccacaaaattggatgaaaacaataagcatatctaagcaactacgatatctgtatggatcaggccaaagtcccgctaagattctccaatgttttcatggtctgagccccgctcctgttcccatctccactgcccctcggccctgtctgtgccctgcctctcagaggagggggctcagatggtgcggcctgagtgtgcggccggcggcatttgggatacacccgtagggtgggcggggtgtgtcccaggcctaattccatctttccaccatgacagagatgcccttgtgaggctggcctccttggcgcctgtccccacggcccccgcagcgtgagccacgatgctccccataccccacccattcccgatacaccttacttactgtgtgttggcccagccagagtgaggaaggagtttggccacattggagatggcggtagctgagcagacatgcccccacgagtagcctgactccctggtgtgctcctggaaggaagatcttggggacccccccaccggagcacacctagggatcatctttgcccgtctcctggggaccccccaagaaatgtggagtcctcgggggccgtgcactgatgcggggagtgtgggaagtctggcggttggaggggtgggtggggggcagtgggggctgggcggggggagttctggggtaggaagtggtcccgggagattttggatggaaaagtcaggaggattgacagcagacttgcagaattacatagagaaattaggaacccccaaatttcatgtcaattgatctattccccctctttgtttcttggggcatttttccttttttttttttttttgttttttttttacccctccttagctttatgcgctcagaaaccaaattaaaccccccccccatgtaacaggggggcagtgacaaaagcaagaacgcacgaagccagcctggagaccaccacgtcctgccccccgccatttatcgccctgattggattttgtttttcatctgtccctgttgcttgggttgagttgagggtggagcctcctggggggcactggccactgagcccccttggagaagtcagaggggagtggagaaggccactgtccggcctggcttctggggacagtggctggtccccagaagtcctgagggcggaggggggggttgggcagggtctcctcaggtgtcaggagggtgctcggaggccacaggagggggctcctggctggcctgaggctggccggaggggaaggggctagcaggtgtgtaaacagagggttccatcaggctggggcagggtggccgccttccgcacacttgaggaaccctcccctctccctcggtgacatcttgcccgcccctcagcaccctgccttgtctccaggaggtccgaagctctgtgggacctcttgggggcaaggtggggtgaggccggggagtagggaggtcaggcgggtctgagcccacagagcaggagagctgccaggtctgcccatcgaccaggttgcttgggccccggagcccacgggtctggtgatgccatagcagccaccaccgcggcgcctagggctgcggcagggactcggcctctgggaggtttacctcgcccccacttgtgcccccagctcagcccccctgcacgcagcccgactagcagtctagaggcctgaggcttctgggtcctggtgacggggctggcatgaccccgggggtcgtccatgccagtccgcctcagtcgcagagggtccctcggcaagcgccctgtgagtgggccattcggaacattggacagaagcccaaagagccaaattgtcacaattgtggaacccacattggcctgagatccaaaacgcttcgaggcaccccaaattacctgcccattcgtcaggacacccacccacccagtgttatattctgcctcgccggagtgggtgttcccgggggcacttgccgaccagccccttgcgtccccaggtttgcagctctcccctgggccactaaccatcctggcccgggctgcctgtctgacctccgtgcctagtcgtggctctccatcttgtctcctccccgtgtccccaatgtcttcagtggggggccccctcttgggtcccctcctctgccatcacctgaagacccccacgccaaacactgaatgtcacctgtgcctgccgcctcggtccaccttgcggcccgtgtttgactcaactcaactcctttaacgctaatatttccggcaaaatcccatgcttgggttttgtctttaaccttgtaacgcttgcaatcccaataaagcattaaaagtcatga

SEQ ID NO: 493 - DNA, 3137 bp, Homo sapiens
  EGR1
gagagatcccagcgcgcagaacttggggagccgccgccgccatccgccgccgcagccagcttccgccgccgcaggaccggcccctgccccagcctccgcagccgcggcgcgtccacgcccgcccgcgcccagggcgagtcggggtcgccgcctgcacgcttctcagtgttccccgcgccccgcatgtaacccggccaggcccccgcaactgtgtcccctgcagctccagccccgggctgcacccccccgccccgacaccagctctccagcctgctcgtccaggatggccgcggccaaggccgagatgcagctgatgtccccgctgcagatctctgacccgttcggatcctttcctcactcgcccaccatggacaactaccctaagctggaggagatgatgctgctgagcaacggggctccccagttcctcggcgccgccggggccccagagggcagcggcagcaacagcagcagcagcagcagcgggggcggtggaggcggcgggggcggcagcaacagcagcagcagcagcagcaccttcaaccctcaggcggacacgggcgagcagccctacgagcacctgaccgcagagtcttttcctgacatctctctgaacaacgagaaggtgctggtggagaccagttaccccagccaaaccactcgactgccccccatcacctatactggccgcttttccctggagcctgcacccaacagtggcaacaccttgtggcccgagcccctcttcagcttggtcagtggcctagtgagcatgaccaacccaccggcctcctcgtcctcagcaccatctccagcggcctcctccgcctccgcctcccagagcccacccctgagctgcgcagtgccatccaacgacagcagtcccatttactcagcggcacccaccttccccacgccgaacactgacattttccctgagccacaaagccaggccttcccgggctcggcagggacagcgctccagtacccgcctcctgcctaccctgccgccaagggtggcttccaggttcccatgatccccgactacctgtttccacagcagcagggggatctgggcctgggcaccccagaccagaagcccttccagggcctggagagccgcacccagcagccttcgctaacccctctgtctactattaaggcctttgccactcagtcgggctcccaggacctgaaggccctcaataccagctaccagtcccagctcatcaaacccagccgcatgcgcaagtaccccaaccggcccagcaagacgcccccccacgaacgcccttacgcttgcccagtggagtcctgtgatcgccgcttctcccgctccgacgagctcacccgccacatccgcatccacacaggccagaagcccttccagtgccgcatctgcatgcgcaacttcagccgcagcgaccacctcaccacccacatccgcacccacacaggcgaaaagcccttcgcctgcgacatctgtggaagaaagtttgccaggagcgatgaacgcaagaggcataccaagatccacttgcggcagaaggacaagaaagcagacaaaagtgttgtggcctcttcggccacctcctctctctcttcctacccgtccccggttgctacctcttacccgtccccggttactacctcttatccatccccggccaccacctcatacccatcccctgtgcccacctccttctcctctcccggctcctcgacctacccatcccctgtgcacagtggcttcccctccccgtcggtggccaccacgtactcctctgttccccctgctttcccggcccaggtcagcagcttcccttcctcagctgtcaccaactccttcagcgcctccacagggctttcggacatgacagcaaccttttctcccaggacaattgaaatttgctaaagggaaaggggaaagaaagggaaaagggagaaaaagaaacacaagagacttaaaggacaggaggaggagatggccataggagaggagggttcctcttaggtcagatggaggttctcagagccaagtcctccctctctactggagtggaaggtctattggccaacaatcctttctgcccacttccccttccccaattactattccctttgacttcagctgcctgaaacagccatgtccaagttcttcacctctatccaaagaacttgatttgcatggattttggataaatcatttcagtatcatctccatcatatgcctgaccccttgctcccttcaatgctagaaaatcgagttggcaaaatggggtttgggcccctcagagccctgccctgcacccttgtacagtgtctgtgccatggatttcgtttttcttggggtactcttgatgtgaagataatttgcatattctattgtattatttggagttaggtcctcacttgggggaaaaaaaaaaaagaaaagccaagcaaaccaatggtgatcctctattttgtgatgatgctgtgacaataagtttgaacctttttttttgaaacagcagtcccagtattctcagagcatgtgtcagagtgttgttccgttaacctttttgtaaatactgcttgaccgtactctcacatgtggcaaaatatggtttggtttttctttttttttttttttgaaagtgttttttcttcgtccttttggtttaaaaagtttcacgtcttggtgccttttgtgtgatgcgccttgctgatggcttgacatgtgcaattgtgagggacatgctcacctctagccttaaggggggcagggagtgatgatttgggggaggctttgggagcaaaataaggaagagggctgagctgagcttcggttctccagaatgtaagaaaacaaaatctaaaacaaaatctgaactctcaaaagtctatttttttaactgaaaatgtaaatttataaatatattcaggagttggaatgttgtagttacctactgagtaggcggcgatttttgtatgttatgaacatgcagttcattattttgtggttctattttactttgtacttgtgtttgcttaaacaaagtgactgtttggcttataaacacattgaatgcgctttattgcccatgggatatgtggtgtatatccttccaaaaaattaaaacgaaaataaagta

SEQ ID NO: 494 - DNA, 7698 bp, Homo sapiens
  Prax1 (benzodiazapine receptor associated protein 1; BZRAP1; PRAX-1, KIAA0612)
aattctgaggctcagccctcctcggagcccaccatctcgaggctcctggactgtaagggacccctgcagtccccagagcagaggccagcaggggctgagactatgaggcaagcagcccatcgacccaggcctccttaggaccagcccagccacccagcaagcgaaagagcagcagcagagagcagagccggagataaaggaccacagcggaccactggggatcacccccagcagctcctgaagcctctggccgggctgaggggttgcgacagacggccagacccacagacactgacagacacacaacgacaccgatgcacacagctgcacgacactgacacactcagatacaaccagggacagcatcacatactgccacagccctgcaatacagacacccacacacacacacacaaacaactggcaactctgaaatgggcagacagtgacacacagcaccacccccctcaacacacagaagtgggggcacccatcttcccaacacatgagacagcattgacctgcacggacagacctggagacacacacacgcaccctcacccaggcgcagctgtcggtggcctctgcacatcctccctacccccacagggacaccctcgctcctccacatactcgcgcacacacacagctaccagcaaacatagctcacatacccctggctccagctccagcagccctggcgccttctgcagcctcctttgtgggtggggaagagctcagccaaccttggatggagcgtcggtgaagcaagagctcagaggggagaggggctggcctggcatgaccctcgccagtccccccacctggctgggtgatgtcccccggcccgggttctggggccccttggcagtaccatggagcaactgacaaccctcccacggcctggggaccctggagccatggagccatgggcactgcccacctggcatagctggactccaggtcgagggggtgaacctagcagtgcagccccaagcatcgctgatactcctccggcagctctgcagcttcaagaactgaggtctgaggagagttccaagcccaaaggagacgggagctccaggcccgtggggggaactgaccctgaaggagcagaggcttgtctgcccagcctgggccagcaagcatccagctctggacccgcctgccagaggccagaggatgaggaagtggaggctttcctgaaggccaagctgaatatgagctttggggacaggcccaatctggagctgctgagggccctgggggagctgcggcagcgctgtgccatccttaaggaggaaaaccagatgctgaggaagagcagcttccctgagacagaagagaaggtgcggaggctgaagaggaagaacgccgagctggcggtcattgccaagcgcctggaggagagggcccgaaagctgcaggaaacgaacctgagggtggtgagtgcccccttgccccggccggggaccagcttggagttgtgtcggaaggccctagcccgccagcgagcccgggacctcagtgagacagccagtgcactgctggccaaggacaagcagattgctgccttgcagcgggagtgcagggagctgcaggccaggctcactctggtgggcaaggagggtccccagtggctccacgtgcgggacttcgatcggctgctgcgcgagtcccagcgggaggtgctgcggctgcagaggcagatcgcgctgcgcaaccagcgggagacgctcccgctcccgccgtcctggcccccgggccctgctctccaggccagagcaggggcgcctgctcccggggccccgggagaggccacgccccaggaggatgcggacaacctacccgtgattctaggggagccagagaaagagcagagggtgcagcagctggaatcggagctcagcaagaagcggaagaaatgcgagagcctggagcaggaagcccggaaaaagcagaggcgatgtgaggagctggaactgcagctgagacaagcgcagaatgagaatgcccgcctggtggaggagaactcccggctcagtgggagagccacagagaaggagcaggtggagtgggagaatgcggagctgaggggccagctcctgggggtgacacaggagagggactcagcccttcgcaagagccagggcctgcagagcaagctggagagcctggagcaagtgctgaagcacatgcgggaggtggcccagcggcggcagcagctggaggtggagcatgaacaggctcggctcagcctacgggagaagcaggaggaggtccggagactgcagcaggcccaggctgaagcccagagggaacatgaaggagccgtgcagctgctggagtctaccttggattccatgcaggcccgggttcgagagctcgaagaacagtgccgcagccaaaccgagcagttcagcctcctggcacaggaactccaggctttccgcctgcacccgggccccttggatctgctcacatctgccctggactgtgggagccttggagactgcccaccacccccctgctgctgctccattccccagccttgccgggggtctggccccaaagaccttgacctcccgccgggctcccctgggcgctgcaccccaaagtcttccgagcctgcccctgccactctcactggggtccctcgaaggacagccaagaaggcagagtctctctccaactcctcccactccgagtccatccacaacagccccaagtcatgccctacacctgaggtggacacagccagtgaggtagaggagctggaggcagacagtgtctccctgctcccagctgcgccagagggcagccggggaggagccaggatccaggtcttcctagcacgttatagctacaacccctttgagggtcccaatgagaatccagaagcagagcttccgctgacagctggcgagtacatctacatctatggcaacatggatgaggatggcttttttgaaggagagctcatggatggccgaaggggcctggtcccttccaattttgtagagcgtgtgtcggatgatgacctcctgacctccctccctccagagctggccgatttgtcccacagctcaggccctgaactcagtttcctgagtgtaggtgggggtggcagcagtagcgggggccaaagcagtgtgggaaggagccagcccagacctgaggaggaggatgcaggggacgagctcagtctgagcccatcaccggagggcctgggcgagcctcctgccgtgccttacccccgccgtctggtggtcctcaagcagctggcccacagcgtggtgctggcctgggagccgcctcctgagcaagtggagctacacggcttccatatctgtgtgaatggggagctgcgacaggccctggggcctggggcgccacccaaggccgtgctggagaacctggacctgtgggccgggccccttcacatttctgtccaggccctgactagccggggcagctctgacccactgcgctgttgcttggcggtgggtgcccgggccggagtggtgcccagccagctgcgggtccatcggttgacagccacatctgctgagatcacctgggtgcccggcaatagcaacttggcccatgccatctacctcaatggggaagagtgcccacctgccagccccagtacctactgggccaccttctgccacttacggcctggcacaccctatcaggcccaagtggaggctcagctcccaccccaagggccctgggaaccaggctgggagaggctggagcagcgggctgccaccctgcagttcaccacactcccagcaggcccacctgatgcccctctggatgtgcagatcgagcctgggccctcccctgggatcttgatcatcagttggctcccagtcaccatcgatgctgctggcacatccaacggtgtccgggtcacaggctatgccatctacgctgatgggcagaagatcatggaggtggcctcacccacggcaggcagtgtactggtggagttgtcccagctgcagctgctgcaggtgtgtcgtgaggtggtcgtgcgcaccatgtcgccccacggggagtcggcggactccatcccggctcctatcactcccgccctggctccggccagcctgccagcccgagtctcctgcccctcaccgcacccaagcccagaggccagagcgccccttgcttcagcctccccagggcctggagaccccagctctcctctccagcaccctgctccccttggaactcaagagcctccaggagcaccccctgcaagcccttccagagagatggcaaaagggtcccacgaggaccctccagcaccttgctcccaggaggaggctggggcagcagtgctgggcacctcagaggagaggacagccagcacatctaccctgggtgagaaggaccctggccccgcagctccctcactggccaagcaggaggccgagtggactgcaggagaggcctgtccggcctccagctccacccagggagcacgggcccagcaggcgccaaataccgagatgtgccaaggaggagacccagggtctgggctgaggcccagggctgagaaggaggacacagcagagcttggggttcatctggtgaactccctcgtggaccacggccgcaactcagacctgtcagacatccaggaggaagaggaagaggaggaggaggaggaggaagaggagctgggttccaggacttgctccttccagaagcaggttgctggcaacagcatcagggagaatggggccaagtcccagcccgaccccttttgtgagactgacagcgatgaggagatcttggagcagatcctggagctgcccctccagcagttctgtagcaagaagctctttagcatcccggaggaggaggaagaggaagaggaggacgaggaggaggagaagtcaggggcaggctgttcttcccgagaccctggcccgcctgaacctgcattgctggggctgggctgtgacagtggtcagccccgaagacctggccagtgtcccttgtctcctgagtcctccagggctggagactgcctggaagacatgcctggattagttggtggaagcagccggaggagaggagggggctcccctgagaagcccccaagccgcaggcggcctccagatccccgagaacactgcagccgacttctcagcaacaatgggccccaggcctctggacgactgggccccacacgggagaggggtggcctccccgtaattgagggccccaggactggactagaggctagcgggagaggccggctgggcccttcccggaggtgctcccgtggccgggcgctggagcctggcctggccagctgcctttcccccaagtgcttggaaatcagcattgaatatgattcggaggatgagcaggaggcgggcagcgggggcatcagcatcaccagctcctgctaccctggagatggggaggcctggggcacagcaactgtaggaaggcccagggggcctccgaaggccaattcaggccccaagccctacccacgcctcccagcctgggagaaaggggaaccagagcggagaggccgcagtgcgacgggcagagccaaggagccactctcccgggcaacagagaccggagaggccagagggcaggacggctctgggcggaggggcccccagaagagaggtgtccgagtcctcaggccaagcactgcagagctagtccctgcgaggagcccctcagaaacactggcttaccagcacctacccgtcaggatctttgtggctctgtttgactatgaccccgtgtcaatgtcgcccaatcctgatgctggagaagaagagcttcccttccgagagggtcagatcctgaaggtgtttggggacaaggatgccgatggcttctaccagggcgaaggtgggggccggacaggctacattccctgcaacatggtggctgaggtggctgtggacagccctgctgggagacagcaactgctccagcggggttatttgtccccagatattctccttgagggctcagggaatggtccgtttgtgtactccacagcccacacaactgggcctcctcccaagccccgccgctccaagaaagctgagtcggaaggccctgcccagccctgtccaggcccccctaagctggtcccctctgctgacctgaaagctccccactccatggtggctgcatttgactacaacccccaggagagttcccccaatatggacgtggaggcagagctgcccttccgggcaggggatgtcattactgtgtttgggggcatggacgatgacggtttctactatggggaattaaatggacaaaggggcctggttccatccaacttcctggagggccctgggcctgaggcaggcggcctggacagggaacccaggacaccccaggctgagagtcagagaacgaggaggagaagagtccagtgctagatggagatagatatatgtagagagagcaacatgactggggctgcaccacacaagggtccccagggcccccaggtgggccttgtacccccagctctggcagcgcccccaggattgaacgtggggagccccagggcagaagcgagaaggtgtggggtttcttctccaaggggaagcagctcctcaggaggctgggctctgggaagaaggagtgaagctgtggcccatcctgcaggcagaagaggccctgagaggcccccagatcactgtctctgctgagcagggaaggctcagactgggcccagagcccccgttcttctgcgttaacactgtggcattcagagggaatcaaagagccttggtgaaggtcagagctaaatggctccttaaggatgaactctctagagaagcaccttcctcctacaggaggggaaactgagcccacagtgagtatgtaacttgaccaaggtcactgagccaggactggacccaggaccctcgcgtcctggtccacccacctcgtctactagtgtcccacagtgctgcgctagtcccttctgccacccttcccagtcccaggacgggccctggagggagaaaggagcctgtgccccctgatggctctggctgtcctgatcctgtcttccctcccctgaaggaaagtttgcactggattttattggagccccatctccccagcgggcaggcgggcggagcctgtatatatgtatatactcagtgcctcagttcagcttcctccacctcgcttccactgcacaggcccaggaaggagaaaggccaagccaaagtgggccccaccctgcccccgtcgtgctccatccttccctgccggggcctgctggcccctgtaaggtcccgcccccaaagaccctggggccagcggggccgaaagcggagttgggtttgccttattttgctcattggattcaagttcttttgcatagttttcttctaacccctgttggagtccaggggctggagaaaaggacagatttatgcagctattttcatacattccctgttcagagtggggtaggggttctccgccgttacccgatccactccatcccccaccctctgaggggtgagtgtgtctttgcatgtttcctttgctgtggtgggagatagtttgactgaacccccaccttgaccttggtctccaggggtgtggaatggtgggggaatttgtttaaaaagacattttattataataaagtctattttcacaaaa

SEQ ID NO: 495 - DNA, 11618 bp, Homo sapiens
  Neuregulin 1 (NRG1, GGF)
agtaagcctccgcagcccactcggactgcagcctgtttgccgcccgtcctcccattgcagcactcggggcgacagagagggaggaggcgcgcggggacggggacgcccaggaggacccactcgcgggtcccgctccgctccggcagcagcatggggaaaggacgcgcgggccgagttggcaccacagccttgcctccccgattgaaagagatgaaaagccaggaatcggctgcaggttccaaactagtccttcggtgtgaaaccagttctgaatactcctctctcagattcaagtggttcaagaatgggaatgaattgaatcgaaaaaacaaaccacaaaatatcaagatacaaaaaaagccagggaagtcagaacttcgcattaacaaagcatcactggctgattctggagagtatatgtgcaaagtgatcagcaaattaggaaatgacagtgcctctgccaatatcaccatcgtggaatcaaacgagatcatcactggtatgccagcctcaactgaaggagcatatgtgtcttcagctacatctacatccaccactgggacaagccatcttgtaaaatgtgcggagaaggagaaaactttctgtgtgaatggaggggagtgcttcatggtgaaagacctttcaaacccctcgagatacttgtgcaagtgcccaaatgagtttactggtgatcgctgccaaaactacgtaatggccagcttctacaagcatcttgggattgaatttatggaggcggaggagctgtaccagaagagagtgctgaccataaccggcatctgcatcgccctccttgtggtcggcatcatgtgtgtggtggcctactgcaaaaccaagaaacagcggaaaaagctgcatgaccgtcttcggcagagccttcggtctgaacgaaacaatatgatgaacattgccaatgggcctcaccatcctaacccaccccccgagaatgtccagctggtgaatcaatacgtatctaaaaacgtcatctccagtgagcatattgttgagagagaagcagagacatccttttccaccagtcactatacttccacagcccatcactccactactgtcacccagactcctagccacagctggagcaacggacacactgaaagcatcctttccgaaagccactctgtaatcgtgatgtcatccgtagaaaacagtaggcacagcagcccaactgggggcccaagaggacgtcttaatggcacaggaggccctcgtgaatgtaacagcttcctcaggcatgccagagaaacccctgattcctaccgagactctcctcatagtgaaaggtatgtgtcagccatgaccaccccggctcgtatgtcacctgtagatttccacacgccaagctcccccaaatcgcccccttcggaaatgtctccacccgtgtccagcatgacggtgtccatgccttccatggcggtcagccccttcatggaagaagagagacctctacttctcgtgacaccaccaaggctgcgggagaagaagtttgaccatcaccctcagcagttcagctccttccaccacaaccccgcgcatgacagtaacagcctccctgctagccccttgaggatagtggaggatgaggagtatgaaacgacccaagagtacgagccagcccaagagcctgttaagaaactcgccaatagccggcgggccaaaagaaccaagcccaatggccacattgctaacagattggaagtggacagcaacacaagctcccagagcagtaactcagagagtgaaacagaagatgaaagagtaggtgaagatacgcctttcctgggcatacagaaccccctggcagccagtcttgaggcaacacctgccttccgcctggctgacagcaggactaacccagcaggccgcttctcgacacaggaagaaatccaggccaggctgtctagtgtaattgctaaccaagaccctattgctgtataaaacctaaataaacacatagattcacctgtaaaactttattttatataataaagtattccaccttaaattaaacaatttattttattttagcagttctgcaaatagaaaacaggaaaaaaacttttataaattaaatatatgtatgtaaaaatgtgttatgtgccatatgtagcaattttttacagtatttcaaaacgagaaagatatcaatggtgcctttatgttatgttatgtcgagagcaagttttgtacagttacagtgattgcttttccacagtatttctgcaaaacctctcatagattcagtttttgctggcttcttgtgcattgcattatgatgttgactggatgtatgatttgcaagacttgcaactgtccctctgtttgcttgtagtagcacccgatcagtatgtcttgtaatggcacatccatccagatatgcctctcttgtgtatgaagttttctttgctttcagaatatgaaatgagttgtgtctactctgccagccaaaggtttgcctcattgggctctgagataatagtagatccaacagcatgctactattaaatacagcaagaaactgcattaagtaatgttaaatattaggaagaaagtaatactgtgatttaaaaaaaactatattattaatcagaagacagcttgctcttactaaaaggagctctcatttactttatttgattttatttttcttgacaaaaagcaacagttttagggatagcttagaaaatgggttctggcttgctatcagggtaaatctaacaccttacaagaggactgagtgtcactttctctctgggggaatgatccagcagcttatctagttgacaatcaaaacacggctgataaaggtgcaatcatttctgacatgtatttttcactgattttgaagctagtgattggttgtgtcttcttggctcaaaaagaagcatattacggcacaaaaagcccagcccagacagcacatgcagcattttgtctgaaatacttctagagtcaaacgtgcctgctgtacatagcgatgacttgtcatcatagggaagtatttccatcgtagagtgttcagaaggagtgactgtataggtggagagaagcttagtgactccgttgaaattttaaaatgtggatgaccacccctttctcccccttatttttcttttatctttccatgttgccttgatcaggtcataactatgcatgaacattttttatcaggaatggccgatgtgtatgtgatttgtaatcacaagtaatgattcatcaggaaatgtcaatcctgttggaaagattgcacctttacttgcagaagtgacccccacctgtgtcctgacctctccatttacaggctctctcacccatttcccccacctcctttaatttttgctttactgtcataaagtaggactaagattggtctaagcattgcatgttcttttgtgatggtaaatccaaaggaaggcctataagtattaacatttgaaataactgctaattcaggaaaatggaagaaaaaaaattatttgaaacacagaacccatttcatggcctgcctgatatctgtgaaatcagggctggagctttacttaggattcacatggcctcctaggaaccatgggacaaatgggaaacaggttatcgggggattcatgaagtcagtgagagtaattgcttcttttttgcgggtgaactgaatgtatttcttcaccaaatcttgatgttaacaattaaaaagaagaaatgacatgcaagtaggtcttagcagaaaaatgcaggctgggcatgagtcatgttgttaccctcccacatgctcctacaatccacagagatgcctgtctgcaggttcttgaagttattgttagtatttggtatctcaaatttttcgtcactgttcacatgccactttctctgtgcacagtggtatcctcatttgctttttaacctacactgaggagtctttgtcaggttgcactgattttccaattctgcagtaatgagtaagctcacggcatggggaagaagacagtcagtccaatgaagttctctaaattattttaacattgcctttgaaggccttgactcatccttagctatttcaatgaagaaattcctaccatgaatttaaaaccctaaaaattctgtttcaaattctttgggcattggggtactcagatatcccattgtggaagaattttaagaataaatagaagtttctgttgagaaccatgagcaacatgtttcttacaatgagaattgctatgcattttaaaattgcaaatatatatgaaaattgaagacaagaggaaattgtatttctaacttgattctgatcactcacagaggtggcatattattatagttgggacatcctttgcacccttcataaaaaaggccagctgactgctcagcatcacctgccaaggccactagatttgtgtttacaggggtatctctgtgatgcttgtcacatcactcttgaccacctctgttaataaattccgacagtgcagtggcgatcggagtgtgaacttatgttcccagcatatggaaagctatcttaggttttaaggtagtagaaattgcccaggagtttgacagcaactttgtttcccgggtctaaaatcgtatcccactgaggtgtatgcagtggagcataatacatgcaaatacatgcaaaactccttttgtttcacctaagattcactttctatcttactttcccttcctgcctagtgtgacttttgcccccaagagtgcctggacagcattctagtttctacaaaatggtcctctgtgtaggtgaatgtgtcccaaacctgctatcactttcttgtttcagtgtgactgtcttgttagaggtgaagtttatccagggtaacttgctcactaactattcctttttatggcctggggttaaagggcgcatggctcacactggtgaaaataaggaaggcctggtcttatcttgtattaataatactggctgcattccaccagccagagatttctatctgcgaagacctatgaaacactgaagagaaatgtaggcagaaggaaatggccacatatcacaagttctattatatattcttttgtaaatacatattgtatattacttggatgttttcttatatcatttactgtctttttgagttaatgtcagtttttactctctcaacttactatgtaacattgtaaataacataatgtcctttattatttatatttaagcatctaacatatagagttgttttcatataagtttaagataaatgtcaaaaatatatgttcttttgtttttctttgctttaaaattatgtatcttttccttttcttttttttaagaataatttattgttcaggagaaagaatgtatatgtaactgaaactatctgaagaatgcacattgaaggccgtgaggtactgataaactaaagaatttattattcaaaatactaagcaataagtaattgtgatttatttaaagttttgtccattttccatgaaagacatactgcaataaaaatgctactctgtggagacctgggagtgttgctcagcagactacagcttcagtctgttagaccagcacctttcatctcattcccatagttatgctaatttaggattgtgttccatggaccccatgatcaccttgtctatacgttgcttcttgtctgtccattgcttttgccacaccacctgttctcaaatcatctcctccctaccaatgctgtttatcactttcttccttgttgaagaggccacacaaccagacagtactatgcttcctttttcctccatacacaataacagagagagaatattctagggcatgactgcctggatcctggctgttgctatcttttgtagtggcagtaagaaactccttcagactaatgaaaatgtcaacgtgccattcaatcacgaaaggtaacgaaaaatgctctcatggttcaaatagtccaatggcccatagtggcctaaaaggcagccagttgacacctggccatgctaagcttccttataccatccgctaatgactttccattgggcccacaatttacggattcataattttaaaagaggagaaggccaagttaggttcattccccttattctgtcaataaaacaaatcaaactcatgtctatctaactgctcagggaggagcctttgcatgagaaaattctcatattctaagactgagtcatagaaatgagggtattacttttcttactgcaattaacctaaacaaaagccatattttaacaaatagatatttgcatggtacccttcatatattccaagcatttcactcattattccaggtaggttaagagcttctgaagtgtatgaagtaaaggtcagcaatcctttggggtgaacagtggcctcctttggagtttgggggtaacctgagacttcccaccaatgtccacctccatctgtgtacctaattcctattacctagttatggctcctctaggatcatttccaaacactctggatgtccaggaaatttaaattgtagcttttgactgagctagtttttcctatttatattaataaattttcaaaaatgcttgaaatcttcacatttgcaacaactttagttttcatgcacatacaaacacagagagacaaaaattccaaacagacactctccaaaagccaccacactctttcacttgctctatagtcatttagccaaccagccatgcagagaatatttaaaacttaaagattgagacattattctcagtttttgctgaggctttgtaacgaaattgaacactataagcagctattgtagtaattttggttaaaattgtttgcctgggatatagtatttgaggcagaagcacgtgtgtgaaggaggtgaggtggtttggaaagagtgaagactcgcagccagattgaatgtctggataattactataattctcccttcttggttgaaaccatgttctctcttgatttttaaacccaggctgcctctggaaacaagcaaacctgagtctttctaacctgagtcttcccaatcattagatttcttttctgtcctaacgatgaatgataaaaggacttgatgttcacaatttggggttataaggcaggtctgaaatctggagactcaagatgctggaaggagtggaaagtttcgatgactttatatgaatcactttgcactctatgtttggcttgtcctctttgaaactgatttactaaaataaatgtaagggaactattactccaaaagattaacttggcaggaaataccaatactttcagtttatgaaagacaaaactgtcttgttgctacaggaagctgcaatgttcctaacctttaaggttggtgttgaatagggtggtcatgccctcccctgcaggtatctttaggctcctgttgacctcctggtactataactgttcgtcttctctgggtagctattgattttgaactttaacatgcttcaaaactttattcatcagggaaataggaaaagagttttgttacctggaggaaatctattgtgatctacctgagctttttaaaaacagaccaggagaaggaaaccagtaatttttaaagaagagacagagaatgggataatagtttcacccaggatctctttctaaccctttcccttcaaatgaacttattggaacagaattggaaagaagaaaggacatctctgcccaccccacaggatgccaaaaaggctaaagaattacctctgtagatttaaacatctttaatggcttatgtatagatttgctaatacagagagaaatgaactattaaataaaaatcacattttataatatttttatggcttaaaacatcctttatctcctttttgttctctctacatgatatggtaagtgatgaggaaaatttaggctcaggaaggttaaaatctttcttggagttacacatctaagagagctgcagagctgacacttgtacccaggttttctgactgcaaatccagtttctttctattgcgttcttcccctttccctgcctcaagcagaaacaggttttttattttcaacctttatgtatacagtatgttatgttacatctacagctaagtttctttttagaagaatgtgagcccttctagctttggtttagagtgattctagaagccaatttccttggcttagtgattctatgcacctttcctaaacttagctttctaaggaaatgaagtgtacgagtgagaatgaattcacaatttcgacatgtaggtagcatcctaaagtgaaaagaggaggaaatttgtggtcaaagcactctccccaccacttagaaacttactgactgtgggcagcttcctcctccaagtttccttcctgatttacaagaccgtggtgtggtcaggattaaacttgaatacatgtaaggaagcctgaaagtgtctaacacatagcgagtattcaaatgccaccttctatttgatccttcccctccagttccttaagttttggaatctaggtttctcagttccaaatggattgacatttgcatatccccattgcacaatggatcaaataaactttatgttatcatttctccaacatagtgccagtaagcaaatcctttttaataacaacagtatgttgagaaacatatcaccaaataatatttaactttgtagctttgataagttctttaggttttggttttggttttgttttctgagacagggtcttgatctgtcacccagactggagtgcaatggttcaattttagctcactgcaacctgtaactcctgagctcaagtgatcctcccacctcagcctctcaagtagctgggactacaggtgtgctccaccatgcccagcgatttttttttttttttttttttttttttttggtagggacaaggtctcgctatgttgcccaggctggtcttcaattcctggccttaagtgatcctcctgcctcggcctcccaaagtgctggaattacaggcatgagccaccacccataactttatgtttgtttttttgatgcagtataagttcagcttgcttcttatgcagccataccatttcatgttaactctgatttttagcagcttattacattagtgttttattattaatataattttacagaaatttactaaaccatgactctgtagagttttaataatactacctccaaacatcattgcaaacatctagaagaatgaacaaaaatgatcttagatcgacagtatatctgtttgtcttagtttctacacaggatgttcagacatattccatttctttaaaaaaaaaatatatatatatatatatatatataggcctggcacggtggctcatgactgtaatcccagcactttgggaggcttaggcaggcaaatcacctgaggtcaggagtttgagactggcctgaccaacatggtgaaacctcgtctctattaaaattacaaaaattagccgggcgtggtggcacatgcctgtaatcccagctactcgggaggctgaggcaggagaatcacttgaacctgggaggcagaggttgcagtgagttgagatcacgccattgcactccagccttggtgacaagagtgaaactccgtctcaaaaaaaaaaaaaatatgtatatatatatatatatatatatatatatatatatatatatatatataaaatcccaccaaaagtctgcagagtgaccaaattagacggctctggtttcagattaaattctaaatgtgagaaaccacatagctcccatgatccatccaataattcctcacgtcctcttcactctttactccatgcataaaacagaatttttttttctcatcctgggtatgaagcaattaataatttacggatttagcctatttggattcaatcccttcaaactccatactacatccaaggtggaagtgacttaaactctgatatcaatcatcaggcttgtaatataggctttgttaatggcaggagagtctaataaaactttctgttccttatccttcatttaaatgaaaaactttttattgaaaacaatcataactctagctcatcataaatataattcatgaggacattttattatttttatattaaagaaataatattatagatgtaaactttgcacctttctaattattatcatgagttaagctaatacttgtcttctggtccctagatgatgattcttttttgccttactggaggagcccttgtcttgaagtgagttgcttcaacagcagaggacttctagtttctcccagttgagcctaaagtgaacttttcatcttcttcagaggaaggggcttccttgatttgtacttttgtggctcctcagataacacagacaattttatcttggatcccaggttctcttcaccattaagaataagaaagagagaaaatgctgtgcatgacagccacctactccaaactacccaaccccctgtaaccaggtaccttccaacaacgagatgattctgccctcactcaagagtctcccccacaaagattccattctccctttactttttattttttatttttttgcaaaacaaaggcctcctttagtacctccttagtttataacccttatcttcccagctcttcccttcactgatacctctgatttcaaaagttctgaagtcggaagaccacacaatttcagactgtgaacagaaattcagtcagaaattattggagttagaaagaatttagagaaattgtattgaactagaaagtcctctttgattagtggtggccctttagaaagttctagggcagagtcccatggtgtttcatcttttccatgatttgcttgaccaaaaacttttctttcacaacatgaaaatatgctaatccaccacacattttggattctgctctgtttgcctgaggtgttagatctctagccaggactgtgaagggaaggaacttgaatccttcctattgagctattaatgcagagtcagtgagatgaagggttccactcggggtcaaaatcatgtcagttaccaagcaaaggagcaagtaaggggaaacatctcctcatctggttagtggagccacatttcacccactgatcaagccagacctgagcaatagtctagatttctccctccacatctaattggtgacaatggtgattgtaccactgacaggtcacacaagtccacaccctccttcacagcctcactgcttcggctcttgtttatgctcttatcagcatctgtcactaggatccatttgtctcctgactcatctacttcctttcactcccctgggccatccttcacatcatgctagaagactgtgtctaacttgcagaacttattgtgtcaatctcctggttacggcccctccatggctccccacctgacataggaggcccttcacaatctggcttctgtcactcataacttgtctccagccttcattcttcagtctgattttatggttttctagttccccaatacaccacaccagtgtttatgaaaccctagtcattggcctacgaactttatgattattgacatattcatgtaccacctgtattattttttgcatagtgtttatttttaattgactacatttttaactacaataaagtaatttcaactaaaa

SEQ ID NO: 496 - DNA, 11893 bp, Homo sapiens
  ErbB4 (ERBB4)
cacgcgcgcccggctgggggatctcctccgcgtgcccgaaagggggatatgccatttggacatgtaattgtcagcacgggatctgagacttccaaaaaatgaagccggcgacaggactttgggtctgggtgagccttctcgtggcggcggggaccgtccagcccagcgattctcagtcagtgtgtgcaggaacggagaataaactgagctctctctctgacctggaacagcagtaccgagccttgcgcaagtactatgaaaactgtgaggttgtcatgggcaacctggagataaccagcattgagcacaaccgggacctctccttcctgcggtctgttcgagaagtcacaggctacgtgttagtggctcttaatcagtttcgttacctgcctctggagaatttacgcattattcgtgggacaaaactttatgaggatcgatatgccttggcaatatttttaaactacagaaaagatggaaactttggacttcaagaacttggattaaagaacttgacagaaatcctaaatggtggagtctatgtagaccagaacaaattcctttgttatgcagacaccattcattggcaagatattgttcggaacccatggccttccaacttgactcttgtgtcaacaaatggtagttcaggatgtggacgttgccataagtcctgtactggccgttgctggggacccacagaaaatcattgccagactttgacaaggacggtgtgtgcagaacaatgtgacggcagatgctacggaccttacgtcagtgactgctgccatcgagaatgtgctggaggctgctcaggacctaaggacacagactgctttgcctgcatgaatttcaatgacagtggagcatgtgttactcagtgtccccaaacctttgtctacaatccaaccacctttcaactggagcacaatttcaatgcaaagtacacatatggagcattctgtgtcaagaaatgtccacataactttgtggtagattccagttcttgtgtgcgtgcctgccctagttccaagatggaagtagaagaaaatgggattaaaatgtgtaaaccttgcactgacatttgcccaaaagcttgtgatggcattggcacaggatcattgatgtcagctcagactgtggattccagtaacattgacaaattcataaactgtaccaagatcaatgggaatttgatctttctagtcactggtattcatggggacccttacaatgcaattgaagccatagacccagagaaactgaacgtctttcggacagtcagagagataacaggtttcctgaacatacagtcatggccaccaaacatgactgacttcagtgttttttctaacctggtgaccattggtggaagagtactctatagtggcctgtccttgcttatcctcaagcaacagggcatcacctctctacagttccagtccctgaaggaaatcagcgcaggaaacatctatattactgacaacagcaacctgtgttattatcataccattaactggacaacactcttcagcacaatcaaccagagaatagtaatccgggacaacagaaaagctgaaaattgtactgctgaaggaatggtgtgcaaccatctgtgttccagtgatggctgttggggacctgggccagaccaatgtctgtcgtgtcgccgcttcagtagaggaaggatctgcatagagtcttgtaacctctatgatggtgaatttcgggagtttgagaatggctccatctgtgtggagtgtgacccccagtgtgagaagatggaagatggcctcctcacatgccatggaccgggtcctgacaactgtacaaagtgctctcattttaaagatggcccaaactgtgtggaaaaatgtccagatggcttacagggggcaaacagtttcattttcaagtatgctgatccagatcgggagtgccacccatgccatccaaactgcacccaagggtgtaacggtcccactagtcatgactgcatttactacccatggacgggccattccactttaccacaacatgctagaactcccctgattgcagctggagtaattggtgggctcttcattctggtcattgtgggtctgacatttgctgtttatgttagaaggaagagcatcaaaaagaaaagagccttgagaagattcttggaaacagagttggtggaaccattaactcccagtggcacagcacccaatcaagctcaacttcgtattttgaaagaaactgagctgaagagggtaaaagtccttggctcaggtgcttttggaacggtttataaaggtatttgggtacctgaaggagaaactgtgaagattcctgtggctattaagattcttaatgagacaactggtcccaaggcaaatgtggagttcatggatgaagctctgatcatggcaagtatggatcatccacacctagtccggttgctgggtgtgtgtctgagcccaaccatccagctggttactcaacttatgccccatggctgcctgttggagtatgtccacgagcacaaggataacattggatcacaactgctgcttaactggtgtgtccagatagctaagggaatgatgtacctggaagaaagacgactcgttcatcgggatttggcagcccgtaatgtcttagtgaaatctccaaaccatgtgaaaatcacagattttgggctagccagactcttggaaggagatgaaaaagagtacaatgctgatggaggaaagatgccaattaaatggatggctctggagtgtatacattacaggaaattcacccatcagagtgacgtttggagctatggagttactatatgggaactgatgacctttggaggaaaaccctatgatggaattccaacgcgagaaatccctgatttattagagaaaggagaacgtttgcctcagcctcccatctgcactattgacgtttacatggtcatggtcaaatgttggatgattgatgctgacagtagacctaaatttaaggaactggctgctgagttttcaaggatggctcgagaccctcaaagatacctagttattcagggtgatgatcgtatgaagcttcccagtccaaatgacagcaagttctttcagaatctcttggatgaagaggatttggaagatatgatggatgctgaggagtacttggtccctcaggctttcaacatcccacctcccatctatacttccagagcaagaattgactcgaataggaaccagtttgtataccgagatggaggttttgctgctgaacaaggagtgtctgtgccctacagagccccaactagcacaattccagaagctcctgtggcacagggtgctactgctgagatttttgatgactcctgctgtaatggcaccctacgcaagccagtggcaccccatgtccaagaggacagtagcacccagaggtacagtgctgaccccaccgtgtttgccccagaacggagcccacgaggagagctggatgaggaaggttacatgactcctatgcgagacaaacccaaacaagaatacctgaatccagtggaggagaacccttttgtttctcggagaaaaaatggagaccttcaagcattggataatcccgaatatcacaatgcatccaatggtccacccaaggccgaggatgagtatgtgaatgagccactgtacctcaacacctttgccaacaccttgggaaaagctgagtacctgaagaacaacatactgtcaatgccagagaaggccaagaaagcgtttgacaaccctgactactggaaccacagcctgccacctcggagcacccttcagcacccagactacctgcaggagtacagcacaaaatatttttataaacagaatgggcggatccggcctattgtggcagagaatcctgaatacctctctgagttctccctgaagccaggcactgtgctgccgcctccaccttacagacaccggaatactgtggtgtaagctcagttgtggttttttaggtggagagacacacctgctccaatttccccacccccctctctttctctggtggtcttccttctaccccaaggccagtagttttgacacttcccagtggaagatacagagatgcaatgatagttatgtgcttacctaacttgaacattagagggaaagactgaaagagaaagataggaggaaccacaatgtttcttcatttctctgcatgggttggtcaggagaatgaaacagctagagaaggaccagaaaatgtaaggcaatgctgcctactatcaaactagctgtcactttttttctttttctttttctttctttgtttctttcttcctcttcttttttttttttttttttaaagcagatggttgaaacacccatgctatctgttcctatctgcaggaactgatgtgtgcatatttagcatccctggaaatcataataaagtttccattagaacaaaagaataacattttctataacatatgatggtgtctgaaattgagaatccagtttctttccccagcagtttctgtcctagcaagtaagaatggccaactcaactttcataatttaaaaatctccattaaagttataactagtaattatgttttcaacactttttggtttttttcattttgttttgctctgaccgattcctttatatttgctcccctatttttggctttaatttctaattgcaaagatgtttacatcaaagcttcttcacagaatttaagcaagaaatattttaatatagtgaaatggccactactttaagtatacaatctttaaaataagaaagggaggctaatatttttcatgctatcaaattatcttcaccctcatcctttacatttttcaacatttttttttctccataaatgacactacttgataggccgttggttgtctgaagagtagaagggaaactaagagacagttctctgtggttcaggaaaactactgatactttcaggggtggcccaatgagggaatccattgaactggaagaaacacactggattgggtatgtctacctggcagatactcagaaatgtagtttgcacttaagctgtaattttatttgttctttttctgaactccattttggattttgaatcaagcaatatggaagcaaccagcaaattaactaatttaagtacatttttaaaaaaagagctaagataaagactgtggaaatgccaaaccaagcaaattaggaaccttgcaacggtatccagggactatgatgagaggccagcacattatcttcatatgtcacctttgctacgcaaggaaatttgttcagttcgtatacttcgtaagaaggaatgcgagtaaggattggcttgaattccatggaatttctagtatgagactatttatatgaagtagaaggtaactctttgcacataaattggtataataaaaagaaaaacacaaacattcaaagcttagggataggtccttgggtcaaaagttgtaaataaatgtgaaacatcttctcatgcaattattttattatccaacacactaatcttttgatactttatataattccctttcttcatatactgcatccagtactagaaccatcattattatgtatcattttgaaagaatacctgatgagatgaaggatgagaacaaatgacagagatgagtctccaagtaaagggggcctcacatcaataattaggaaacttagatataagtcgcccttttctgaaaattctaccccaagtcatttagatttttaaaaaatatttctaatgttaaaatattgggaccaaattagaatcaatagtataagattaattaattagagtaaaaatatctattaaggcagagaaagtttagagaaaaaaatccaaagaaatttgtgtttcttcctattctgaacaagtaaatccatccatccatccatccaaacctcctttatctaactgtgtctactaaaagcaccatgttttgtggggaacactcagataaatggaatatcatcctcaacttcaaaattctatgatctaggagatttaattaaaatgacattttaatttttctatgcgttccaacaatcagattgcatagtctcttttgtgaatagctgtcatataatcagttgtactgtaagatatctcctttaaactcatttgggatataagttaaacatccttcaaattgttgatgttgacaaacaggataatttcaataatattattcaaacataaactggtctaggagaatattgcatcactgactaattagcctatctagagtctaacttcaccattaaaccaaaagcagatggtggtccttggccaagaatattggagacattggagttggtttttttctaagctataagaagtgaggcgagctgaaaaagtatggtagagcaggagaagggtttgtgagattccttctagtgaagttcaccctcaaacttttcaggggtaaagacacagagtgattcaggggccacaatctaatagctcagggctctcctatccattcagagaagtctctaggaaaagggatctcatatcagtacttatgaaaaattgaatataagcctccctttctaaataaatctgcatcgagtcatcacagccctctttttggatactataccttgattttttttttctgatttacaatatgcatatggtttctactgggctatagaaagcagaatcactcattttggagaaggaaaaaatgaatagttaaaacaaacttttaactgttaaggtaacagaaatgtatttagtgaatgtctctttcctcctaagaacacaagacttctacatgttgggtaatacctagagatgcatgtaggaataatccaaaatgacccaaatgctttataatagcaccactttataattcttttgaatgatttctgtagtatataattgacttcagttgtttgagtgttttttgttttatttttgtcccccctgggaaaacatatttcagcatgtataagagggagaaaaaaagtttcattccttccagagaataacttatttagtccagtagggtagaattttaaaatgtcagttaaagtcttcaaagtgcttggggggatatcagattccagaggccaattgtagcaattgaaatttgcagaatcaattatgtaaatctgagacaaattagtattaaaattacacggagtatattttttaaatcacccaactttgtagattatacctattttgggcaggtatggaaaaattttgcagttaaatgattgcctaaagaaagtggtaaacaggtgaggaaagatggcctctgatctaggatagatccagaaccacaaagcatctgcaccacaaaaggtgttagactaccaagcagctcctggttttctgcatagtattagtagcacagcttaggatgagaatcctttctccagtaacattcttaaaatagcatgaaaaacaacgcaaaactcaaatttctattaaaacacacaaactaaaatcaagtgattcttttttgtagattagggagaaggactgaatatctaatttaagagaaggaatagtgtttaagtgttatagtgtgtgagctaataccttctaaaggaaagacatggcatgaagattgtgcatacttacaatgctaaggaaaaatcaagaaaaggactgtgtgaggctctgctactagatgaagttggaaggactattaatgtgcttcttgaagtatcaaaaatgaaaagaaaattaaaattgtttaagcctgacagggaaggatgtaaatacaagtttttctagagctctctaacctttatttcaaaactggaattattcatccatctgtaattgttgataatttaactagtatatgtagttcataaggtaatagaaaaggtgatcatgaaagcatgtatataactggacagaaccacgataatgctataagatgtagatttagttaggttatcagatgttaaatgattttaatattattaaataaatcaaactagaaaactaaccacaagtataatgtaacaaagttaaatgcaggatataaaaatgtaggatggattttgcatagtaaaaagataagtttgccatttaaaattgttgtttgttgggtttagctgaaagtaggcatatatggttccacttgggaaaacttgctttaaagcattacaatgaacaattttttctcattctcttattcctttatcactttttaaatgtaaagaaaattgtatttatttatttttttaaataaacaccaccttgcagaatttaataggcaaacatgttacatatgactaagtaagggtcttcaagatgaagtaaagaaaatgtaaatgttctattaccttatgcagagacaaaaaaaaaaaggagtggtgtcatttagctagcaaacaaacaaaatacagttaattggtgatatgtcctttcttttctcactatgccctcttgcctccaaaaatgacaacaaagaatcacaatttttctgataaataaatgctaaaccaagcgtttcaaactattgcattgccattcttttggactttagttattagaatgatgattgttatagggcaaatgagaaatccatgtgcatcagcttctagttgttaaaaaaaccagataaattaacttctactgtatactgtgggcagaggatcctagagctgatcctacaacatcagcttctagttgttaaaaaaaaaaaaagaaacagataaattaacttctactgtatatactgtgggcagaggatcttactgtgcctctgtttgtgtacatggacttcggtgtgtatcagtttgaaggacagccttgccccatgtaaacatataaatgcagattggtatcgcctggttgctatttgcttaagaacaaatattatacagatgagatcaggcataattttaaaagatcattatcagtggagacctcattattactgatattacaatggggccagtttttatacttctgggtagaattaataaaatttttctgatcccagagatctgagttctctctgcagttggaaacaagaagctgttgtgggcattgtgtcgggccaggggcccttgtgtttgtgtgggcaaatatcttttagcagtgtgagctgcttttttcttttcattaaaagtctctctaaaataatagaaatttcagatactcggttcaagtctcactgattttgtagaggtccaaaaatgtaggatctgtcacttttgcaggcccctgcctcacctaattcctggccaggtgacattttgggcagaagtaaatgcttctatagtcacaagctaaaatgactctaagccccaatttcacggggggtattcacatgcttcctctggaaaatactctttgacagtcagctttgcaagtaagtgattaccttgttaggaatcaaagaaaaatgtatttctctctgacctttagaggaaaatagaatccttcccttttttgcccattgacacaactggcactgctctcttccctttctaccaccctggttcaaagtagtcccccgatgctgtcctgttcctttcttaagccatagtggatctctgagatcctacaccccactttgtgaaacactgacttcatctttgccctcgaatgcctgattttttcataagagattctagcaatttggacactgtttaagtgaactatcaaactaccgcatagagaatatttaagctattaaaattatggtttcccatgaagatcaattctctgtgtccttccctataggaatttgagacgagttagccctgtgatgaatcttgaaactcacatatgtccacatacacttggtagaacttcgatttaatctttacataaaagctgtacatataaccaagaagttatttttgccagtaaattaacttatttgctttattcatcttatttggttcctaatcgtaaatattttgtagctgctgtaaatttttttctcccaaatgaggagtcttattatcataaaggtaaaggctattcagctttgataaccacctgcaattcttttttggatcattcatccatctaacaaatacataatgaggacagttcatgttaatgaaaatccatgttgtttaatagaatgccatcctttacctacttttgctctttatggacgtttttcttttcatgctctagtgagctttccctatatcatgagaagtggttatatttgtgcaaatatacaaatataggaaaacaaagattcatacctgtaggcaatagtctaacttgtccaaaccactttgcctttactgctatttttatccccaatgcgtagatatttcccccaggcctatagcctttgtgaaggaaagcaaatcatacctcctgtatattgacacgaatctggttttcaaatgtcatttccagattttttagttaattgggggttgtccttttcccttaatgtgagagtcattttcctgtatatttctggatctctcaggggctgggaggggggagtgaggggactacaaccatagcactccaagaacccttttgggattactccagtaatcaactacgaaagttattttctaaatgtagatatgtaaggtgttcttttaaagtaaggtactttgaaatatgtagcataaactggtactgctgttaaatgggtcgattattaaacggagcagctgtgtgagggcagctaactttgaatgcctgtctccctggctggtgtgtctccttctcatgttgagagcaccagggattgcgtggctgcatgctgaaaccgcattttcccatggtgtatgactagttcatctctttcttgagcaccattacaagaagatcaaatgaaaatgagatcaatgtggaagacaattcatagcacaaaaaaagtcatcttaaatctactctcaaacattcatcttatacatgcatcaaagtaatttactgacatcagtttgggtgagagagggagtcactttactgaaaaggcagaggcttaaggtgtatacatttgtactcacttccttattttcttaacttgtaagcagaaaacaagccctctctcttgtgaagtatcttcaaaggattggggtgcaaaaataccttgctggtaagccatcaatgttttatttaaatccctgcattcaaagttagctgcctttttgaaataaacaaacaaaaaatactactgtatgtttgaaaatgtgaatagtatttttatagcttgttaaagacatggctagttgcatttgtaaataagtataatgttgctttgattttcttttgtggacatctttatttggaacataattgtctttagggttgatttgtatataagtaattggcctgtgattgtttcttttttggttggaagttatcattttgacattacttgtgattctgtgttcagcactattgtgatgtgttcaacctctgcactcgcttacacaataggatatgccaattgtgtgtggtgtaatgttattttgatttttttccatgttattgatgaaggatcatgcacctaacacatactaacttttttaatgttaggcatatttttagtatactttctcttattctttcttctcctccaaccttttacccatcctccttcctttccctcattcctgttgttatttgagaatgagggagaaacagtattttacatttatgtaattaggcttttccgttagttctcaaggatcctcttttggctcttgggaaagaattgtacctgtacaaggcaattatagaatgcgaactgctttgcctcattccatactgatcatcccagctgaacaatttgaaaactgttctgcctttttgttacatgaatctgtcagaaatatatttttaatttaatataaatgaaattcaataaaatatgaaacaaacgttaaaaaaaaaaaaaaaaaa

SEQ ID NO: 497 - DNA, 3301 bp, Homo sapiens
  Periostin (POSTN)
gccagttctcttcggggactaactgcaacggagagactcaagatgattccctttttacccatgttttctctactattgctgcttattgttaaccctataaacgccaacaatcattatgacaagatcttggctcatagtcgtatcaggggtcgggaccaaggcccaaatgtctgtgcccttcaacagattttgggcaccaaaaagaaatacttcagcacttgtaagaactggtataaaaagtccatctgtggacagaaaacgactgtgttatatgaatgttgccctggttatatgagaatggaaggaatgaaaggctgcccagcagttttgcccattgaccatgtttatggcactctgggcatcgtgggagccaccacaacgcagcgctattctgacgcctcaaaactgagggaggagatcgagggaaagggatccttcacttactttgcaccgagtaatgaggcttgggacaacttggattctgatatccgtagaggtttggagagcaacgtgaatgttgaattactgaatgctttacatagtcacatgattaataagagaatgttgaccaaggacttaaaaaatggcatgattattccttcaatgtataacaatttggggcttttcattaaccattatcctaatggggttgtcactgttaattgtgctcgaatcatccatgggaaccagattgcaacaaatggtgttgtccatgtcattgaccgtgtgcttacacaaattggtacctcaattcaagacttcattgaagcagaagatgacctttcatcttttagagcagctgccatcacatcggacatattggaggcccttggaagagacggtcacttcacactctttgctcccaccaatgaggcttttgagaaacttccacgaggtgtcctagaaaggatcatgggagacaaagtggcttccgaagctcttatgaagtaccacatcttaaatactctccagtgttctgagtctattatgggaggagcagtctttgagacgctggaaggaaatacaattgagataggatgtgacggtgacagtataacagtaaatggaatcaaaatggtgaacaaaaaggatattgtgacaaataatggtgtgatccatttgattgatcaggtcctaattcctgattctgccaaacaagttattgagctggctggaaaacagcaaaccaccttcacggatcttgtggcccaattaggcttggcatctgctctgaggccagatggagaatacactttgctggcacctgtgaataatgcattttctgatgatactctcagcatggatcagcgcctccttaaattaattctgcagaatcacatattgaaagtaaaagttggccttaatgagctttacaacgggcaaatactggaaaccatcggaggcaaacagctcagagtcttcgtatatcgtacagctgtctgcattgaaaattcatgcatggagaaagggagtaagcaagggagaaacggtgcgattcacatattccgcgagatcatcaagccagcagagaaatccctccatgaaaagttaaaacaagataagcgctttagcaccttcctcagcctacttgaagctgcagacttgaaagagctcctgacacaacctggagactggacattatttgtgccaaccaatgatgcttttaagggaatgactagtgaagaaaaagaaattctgatacgggacaaaaatgctcttcaaaacatcattctttatcacctgacaccaggagttttcattggaaaaggatttgaacctggtgttactaacattttaaagaccacacaaggaagcaaaatctttctgaaagaagtaaatgatacacttctggtgaatgaattgaaatcaaaagaatctgacatcatgacaacaaatggtgtaattcatgttgtagataaactcctctatccagcagacacacctgttggaaatgatcaactgctggaaatacttaataaattaatcaaatacatccaaattaagtttgttcgtggtagcaccttcaaagaaatccccgtgactgtctatacaactaaaattataaccaaagttgtggaaccaaaaattaaagtgattgaaggcagtcttcagcctattatcaaaactgaaggacccacactaacaaaagtcaaaattgaaggtgaacctgaattcagactgattaaagaaggtgaaacaataactgaagtgatccatggagagccaattattaaaaaatacaccaaaatcattgatggagtgcctgtggaaataactgaaaaagagacacgagaagaacgaatcattacaggtcctgaaataaaatacactaggatttctactggaggtggagaaacagaagaaactctgaagaaattgttacaagaagaggtcaccaaggtcaccaaattcattgaaggtggtgatggtcatttatttgaagatgaagaaattaaaagactgcttcagggagacacacccgtgaggaagttgcaagccaacaaaaaagttcaaggatctagaagacgattaagggaaggtcgttctcagtgaaaatccaaaaaccagaaaaaaatgtttatacaaccctaagtcaataacctgaccttagaaaattgtgagagccaagttgacttcaggaactgaaacatcagcacaaagaagcaatcatcaaataattctgaacacaaatttaatatttttttttctgaatgagaaacatgagggaaattgtggagttagcctcctgtggtaaaggaattgaagaaaatataacaccttacaccctttttcatcttgacattaaaagttctggctaactttggaatccattagagaaaaatccttgtcaccagattcattacaattcaaatcgaagagttgtgaactgttatcccattgaaaagaccgagccttgtatgtatgttatggatacataaaatgcacgcaagccattatctctccatgggaagctaagttataaaaataggtgcttggtgtacaaaactttttatatcaaaaggctttgcacatttctatatgagtgggtttactggtaaattatgttattttttacaactaattttgtactctcagaatgtttgtcatatgcttcttgcaatgcatattttttaatctcaaacgtttcaataaaaccatttttcagatataaagagaattacttcaaattgagtaattcagaaaaactcaagatttaagttaaaaagtggtttggacttgggaacaggactttatacctcttttactgtaacaagtactcattaaaggaaattgaatgaaa

SEQ ID NO: 498 - DNA, 1701 bp, Homo sapiens
  HAND1
agaagggttaaacaggtctttgggcttcggcgacctcgcccgcggcagaaaccggtaagaagacagtgggctgcgcgtctcattttcagccttgcccggactctcccaaagccggcgcccagtagtggctccagagcccacaggtggcccccggcagtctctggggcgcatggagcggcgttaatagggctggcggcgcaggccagtagccgctccaacatgaacctcgtgggcagctacgcacaccatcaccaccatcaccacccgcaccctgcgcaccccatgctccacgaacccttcctcttcggtccggcctcgcgctgtcatcaggaaaggccctacttccagagctggctgctgagcccggctgacgctgccccggacttccctgcgggcgggccgccgcccgcggccgctgcagccgccaccgcctatggtcctgacgccaggcctgggcagagccccgggcggctggaggcgcttggcggccgtcttggccggcggaaaggctcaggacccaagaaggagcggagacgcactgagagcattaacagcgcattcgcggagttgcgcgagtgcatccccaacgtgccggccgacaccaagctctccaagatcaagactctgcgcctagccaccagctacatcgcctacctgatggacgtgctggccaaggatgcacagtctggcgatcccgaggccttcaaggctgaactcaagaaggcggatggcggccgtgagagcaagcggaaaagggagctgcagcagcacgaaggttttcctcctgccctgggcccagtcgagaagaggattaaaggacgcaccggctggccgcagcaagtctgggcgctggagttaaaccagtgagccgaggcccgcgccgaggacctggccaggccagccactcctgaagccccgggaggagaggaaggcagcggcgaacgccaggctctgggctccggcgactggtgctacgcatcccgcggagcttctgctgagcgccggcaggtcgtcggctgcaaccacacacttggatcgcacgtgcaatgtcctttgattttttttaatacattaagagaaagagaaatatatatatatccacccccagcccaaccgagggcggcccttggcggcaacatgcaagaaggagggactgtcgaacccaagggctcaaagacgcactcttccacccttttggagcgaatttagaacctcagccctatctccatttccctatctggctctttctctcttgtccctccatatgatccgccccgacgccgtcttctctaattaaaatgcaataaggaatcaattcttttctgcctgagaaagagaaccagacgcaggaagatgaaaggctgccctttgttcttcgaatcgtggtggttttattttatttttctttttgtcgctgcacttcctgtttagttccaagggaaacactttctctctttctctgtctctctcttttcttccttcttttccttcctttttgtttctatctaaataaaagctttccctgtgttggaaagtttttatgtatttaaactacctaccatgcctgttgtgctcaggtgtttgttcatcctgccatccccaacccttttctacctcaagtctgtgtgaccactcacagcccccctcccttcgccaaagcagtgtctatgctcttgattaataaaacattttctgaaatca

SEQ ID NO: 499 - DNA, 2110 bp, Homo sapiens
  E2F4
aggaacggaagcggaagtggcggcggcgccggcctggcctggcctggctgaggggaggcggcgggcgggcgcgatggcggaggccgggccacaggcgccgccgcccccgggcactccaagccggcacgaaaagagcctgggactgctcaccaccaagttcgtgtcccttctgcaggaggccaaggacggcgtgcttgacctcaagctggcagctgacaccctagctgtacgccagaagcggcggatttacgacattaccaatgttttggaaggtatcgggctaatcgagaaaaagtccaagaacagcatccagtggaagggtgtggggcctggctgcaatacccgggagattgctgacaaactgattgagctcaaggcagagatcgaggagctgcagcagcgggagcaagaactagaccagcacaaggtgtgggtgcagcagagcatccggaacgtcacagaggacgtgcagaacagctgtttggcctacgtcactcatgaggacatctgcagatgctttgctggagataccctcttggccatccgggccccatcaggcaccagcctggaggtgcccatcccagagggtctcaatgggcagaagaagtaccagattcacctgaagagtgtgagtggtcccattgaggttctgctggtgaacaaggaggcatggagctcaccccctgtggctgtgcctgtgccaccacctgaagatttgctccagagcccatctgctgtttctacacctccacctctgcccaagcctgccctagcccagtcccaggaagcctcacgtccaaatagtcctcagctcactcccactgctgtccctggcagtgcagaagtccagggaatggctggcccagcagctgagatcacagtgagtggcggccctgggactgatagcaaggacagtggtgagctcagttcactcccactgggcccaacaacactggacacccggccactgcagtcttctgccctgctggacagcagcagcagcagcagcagcagcagcagcagcagcagcaacagtaacagcagcagttcgtccggacccaacccttctacctcctttgagcccatcaaggcagaccccacaggtgttttggaactccccaaagagctgtcagaaatctttgatcccacacgagagtgcatgagctcggagctgctggaggagttgatgtcctcagaagtgtttgcccctctgcttcgtctttctccacccccgggagaccacgattatatctacaacctggacgagagtgaaggtgtctgtgacctctttgatgtgcctgttctcaacctctgactgacagggacatgccctgtgtggctgggacccagactgtctgacctgggggttgcctggggacctctcccacccgacccctacagagcttgagagccacagacgcctggcttctccggcctcccctcaccgcacagttctggccacagctcccgctcctgtgctggcacttctgtgctcgcagagcaggggaacaggactcagcccccatcaccgtggagccaaagtgtttgcttctccctttctgcggccttcgccagcccaggctcggctgccacccagtggcacagaaccgaggagctgccattaccccccatagggggcagtgtcttgttcctgccagcctcagtgtcttgcttctgccagctccttcccctaggagggaagggtggggtggaactgggcacatgccagcaccacttctagcttccttcgctatcccccaccccctgaccctccagctcctcctggccctctcacgtgcccacttctgctgggcctttagccctagaacctgcaggtggtgggggcggctaccaagaaggaacagaggtctctggggaggagtctgggtggtccagccctgatgattggccccacctcctgctgccccataaccctctcttcatttcggctttttcatttaccctcatttagagccatttgcagagatttagaaagatttacagtaacgaatggattcctatataaagattatttttatactttttgcagcaaaaggaaattgtaatatttgtacagtgttcaagtgaataaaaaccatgcctaaggcta

SEQ ID NO: 500 - DNA, 3715 bp, Homo sapiens
  Skp2
agtggggatggaacgttgctaggcttagcgggtctggctgctgggggcccgagcagcacgctcggagccgccgcgcgccaaagcgggaatctgggaggcgagcagctctgcagttaatgcacgtattttaaactcccgggcctgcggacgctatgcacaggaagcacctccaggagattccagacctgagtagcaacgttgccaccagcttcacgtggggatgggattccagcaagacttctgaactgctgtcaggcatgggggtctccgccctggagaaagaggagcccgacagtgagaacatcccccaggaactgctctcaaacctgggccacccggagagccccccacggaaacggctgaagagcaaagggagtgacaaagactttgtgattgtccgcaggcctaagctaaatcgagagaactttccaggtgtttcatgggactcccttccggatgagctgctcttgggaatcttttcctgtctgtgcctccctgagctgctaaaggtctctggtgtttgtaagaggtggtatcgcctagcgtctgatgagtctctatggcagaccttagacctcacaggtaaaaatctgcacccggatgtgactggtcggttgctgtctcaaggggtgattgccttccgctgcccacgatcatttatggaccaaccattggctgaacatttcagcccttttcgtgtacagcacatggacctatcgaactcagttatagaagtgtccaccctccacggcatactgtctcagtgttccaagttgcagaatctaagcctggaaggcctgcggctttcggatcccattgtcaatactctcgcaaaaaactcaaatttagtgcgacttaacctttctgggtgttctggattctctgaatttgccctgcagactttgctaagcagctgttccagactggatgagctgaacctctcctggtgttttgatttcactgaaaagcatgtacaggtggctgttgcgcatgtgtcagagaccatcacccagctgaatcttagcggctacagaaagaatctccagaaatcagatctctctactttagttagaagatgccccaatcttgtccatctagacttaagtgatagtgtcatgctaaagaatgactgctttcaggaatttttccagctcaactacctccaacacctatcactcagtcggtgctatgatataatacctgaaactttacttgaacttggagaaattcccacactaaaaacactacaagtttttggaatcgtgccagatggtacccttcaactgttaaaggaagcccttcctcatctacagattaattgctcccatttcaccaccattgccaggccaactattggcaacaaaaagaaccaggagatatggggcatcaaatgccgactgacactgcaaaagcccagttgtctatgaagtatttattgcaggatggtgtctcttctttagaacagggaaaataggcaggaagcccaattgctggagtacttagctagttttattcttggttttccctttgccttcattctgcaagtatactagggagccatttgagagggaaaactatgaaatcttgctttttgaaatgattctaaaagcttctatcactgctttgctcttaagagccaaagttgtaggccttttgaaattttaggagagtgagcctataatttcaagataccttaaagagcaaaatttgagccacctcttccaagtgcccttcttactaagtctattcagaatcaagcttaaaaattaccaccagcaaacaatcttcatagcccatataacttttatctatttaattttatagtattgctttataagacagcttagaagaacaataagctatttgtattatgagctgaacaaaaagagaatcataggatagtagcgtctgaggccatcttttctaggaataggaaagagaaaaatgtatttgaattttgcctttagatttgaaattaggttaatagaaataagtaaccccatgtaattcaccttaaaacttaacaaaagaccaaacattacaaaacccagagatatagaatcaatataggatttgaaggcccagcagacagttttctatgacaggttaatctgaagtatcctgtaatgttcattaagttactgtgtttccagaatctaaattagatgagaaatataattgtggttttctaacttgataatcaaattatgttaacatgggtcctttagcttttaaaatgacttgctttgttttagaaaggtggtattaatccactctctattcttgaaaatttggatgggagaattctgaagttgcctgctgttttcctttagcgctgaggttcttaaggttacttttatattactctggaatcaagtattttaaattgtattttttttttaaatgatctctcagcaataattgtttgaaactatccatatataaggttatcagacctacagttccctaagaggaactgcatgttctcttcaatcagaaatatacagtagaagcaggtatatcttccatgcagtttcagtagtaagcactacttatacctacataagagttaaaatccagatgtgggaccttttgataccatcagtgatatatatttttttaaactggtacagagaagtgaaaagattaaattctacttctattttttttttttttttttgagacggagtctcgctctgtcaccaaggccggagtgcagtggtgcgatctcggctcactgcaagctccgcctcccaggttcacgtcattctcctgcctcagcctcccgactagctgggactacaggcgcccaccaccacgcccggctaatttttttgtatttttagtagagacggggtttcaccatgttagccaggatggtctcaatctcctgacctcatgatccgcccgtcttggcctcccaaagtgctgggattacaggcatgagcaactgcgcccagccaaattctacttcttaaaaatcacaaaaactagtttaaattgatgacttgttcgtatgttcaaaatgtaacaacaaaaaaagctaacaccagtcatttatattaactttttttttttaaatcaaaaattgttaatgttagaaacatactatgaagtgcctttatctgcttagacctaaggaagattttaaagttgggttgcacaggaaatgatgatgcttcaatttcttaatagttaaaaagtgctaaatactacttgaaattattgtttacagattagtgacaagagctggggttaggatccggttggactctgacatcggatgccctcaaacatacagaacttccaaactcaagtccagccataagctattttgccaacatgtcagagtaatctgtatttttgtatgtgatttctacttttatagacttgttttaaaacaataaaacacatttttataaaaatgagtgcttaaactaagttgtattccttttttctttctctttttttaagtgctgtggttaaaatttgaaagcatttagtgtggtatgccatttggcttagatacctctaaataagactcttcaaaacagagccctgagatggtcctttttgacccatctacttcatatgcttgtcacattaaaaaaaaaagtttataatgcctttataaaaggggctaatacagtcttgttatctttttttttaaattatactttaagttctagggtacatgtgcacaacgtgcaggttt

SEQ ID NO: 501 - DNA, 3008 bp, Homo sapiens; identical to SEQ ID NO: 479
  Akt1

SEQ ID NO: 502 - DNA, 2561 bp, Homo sapiens
  BAG3
gcatccaaccccgggccgcggccaacttctctggactggaccagaagtttctagccggccagttgctacctccctttatctcctccttcccctctggcagcgaggaggctatttccagacacttccacccctctctggccacgtcacccccgcctttaattcataaaggtgcccggcgccggcttcccggacacgtcggcggcggagaggggcccacggcggcggcccggccagagactcggcgcccggagccagcgccccgcacccgcgccccagcgggcagaccccaacccagcatgagcgccgccacccactcgcccatgatgcaggtggcgtccggcaacggtgaccgcgaccctttgccccccggatgggagatcaagatcgacccgcagaccggctggcccttcttcgtggaccacaacagccgcaccactacgtggaacgacccgcgcgtgccctctgagggccccaaggagactccatcctctgccaatggcccttcccgggagggctctaggctgccgcctgctagggaaggccaccctgtgtacccccagctccgaccaggctacattcccattcctgtgctccatgaaggcgctgagaaccggcaggtgcaccctttccatgtctatccccagcctgggatgcagcgattccgaactgaggcggcagcagcggctcctcagaggtcccagtcacctctgcggggcatgccagaaaccactcagccagataaacagtgtggacaggtggcagcggcggcggcagcccagcccccagcctcccacggacctgagcggtcccagtctccagctgcctctgactgctcatcctcatcctcctcggccagcctgccttcctccggcaggagcagcctgggcagtcaccagctcccgcgggggtacatctccattccggtgatacacgagcagaacgttacccggccagcagcccagccctccttccaccaagcccagaagacgcactacccagcgcagcagggggagtaccagacccaccagcctgtgtaccacaagatccagggggatgactgggagccccggcccctgcgggcggcatccccgttcaggtcatctgtccagggtgcatcgagccgggagggctcaccagccaggagcagcacgccactccactccccctcgcccatccgtgtgcacaccgtggtcgacaggcctcagcagcccatgacccatcgagaaactgcacctgtttcccagcctgaaaacaaaccagaaagtaagccaggcccagttggaccagaactccctcctggacacatcccaattcaagtgatccgcaaagaggtggattctaaacctgtttcccagaagcccccacctccctctgagaaggtagaggtgaaagttccccctgctccagttccttgtcctcctcccagccctggcccttctgctgtcccctcttcccccaagagtgtggctacagaagagagggcagcccccagcactgcccctgcagaagctacacctccaaaaccaggagaagccgaggctcccccaaaacatccaggagtgctgaaagtggaagccatcctggagaaggtacaggggctggagcaggctgtagacaactttgaaggcaagaagactgacaaaaagtacctgatgatcgaagagtatttgaccaaagagctgctggccctggattcagtggaccccgagggacgagccgatgtgcgtcaggccaggagagacggtgtcaggaaggttcagaccatcttggaaaaacttgaacagaaagccattgatgtcccaggtcaagtccaggtctatgaactccagcccagcaaccttgaagcagatcagccactgcaggcaatcatggagatgggtgccgtggcagcagacaagggcaagaaaaatgctggaaatgcagaagatccccacacagaaacccagcagccagaagccacagcagcagcgacttcaaaccccagcagcatgacagacacccctggtaacccagcagcaccgtagcctctgccctgtaaaaatcagactcggaaccgatgtgtgctttagggaattttaagttgcatgcatttcagagactttaagtcagttggtttttattagctgcttggtatgcagtaacttgggtggaggcaaaacactaataaaagggctaaaaaggaaaatgatgcttttcttctatattcttactctgtacaaataaagaagttgcttgttgtttgagaagtttaaccccgttgcttgttgttctgcagccctgtctacttgggcacccccaccacctgttagctgtggttgtgcactgtcttttgtagctctggactggaggggtagatggggagtcaattacccatcacataaatatgaaacatttatcagaaatgttgccattttaatgagatgattttcttcatctcataattaaaatacctgactttagagagagtaaaatgtgccaggagccataggaatatctgtatgttggatgactttaatgctacattttaaaaaaagaaaataaagtaataatataactcaaaa

SEQ ID NO: 503 - DNA, 3403 bp, Homo sapiens; identical to SEQ ID NO: 477
  beta-adrenergic receptor kinase-carboxyl terminus (betaARKct)

SEQ ID NO: 504 - DNA, 559 bp, Homo sapiens
  S100A1
agccacatttgcaaccttggccatctgtccagaacctgctcccacctcaggcccaggccaaccgtgcactgctgcaatgggctctgagctggagacggcgatggagaccctcatcaacgtgttccacgcccactcgggcaaagagggggacaagtacaagctgagcaagaaggagctgaaagagctgctgcagacggagctctctggcttcctggatgcccagaaggatgtggatgctgtggacaaggtgatgaaggagctagacgagaatggagacggggaggtggacttccaggagtatgtggtgcttgtggctgctctcacagtggcctgtaacaatttcttctgggagaacagttgagcagacagccacattgggcagcgcccttcctctccaccctcccagacctgcctcttccccctgcttccacctcaccccacttatccctctccataaccccacccttgcccaccccacccccacccccaccaagggcgcaagagtagcggtccaagcctgcaactcatctttcattaaaggcttctctctcaccagcca

SEQ ID NO: 505 - DNA, 1348 bp, Homo sapiens
  IL-18 binding protein (IL-18BP)
gagaagaggacgttgtcacagataaagagccaggctcaccagctcctgacgcatgcatcatgaccatgagacacaactggacaccagacctcagccctttgtgggtcctgctcctgtgtgcccacgtcgtcactctcctggtcagagccacacctgtctcgcagaccaccacagctgccactgcctcagttagaagcacaaaggacccctgcccctcccagcccccagtgttcccagcagctaagcagtgtccagcattggaagtgacctggccagaggtggaagtgccactgaatggaacgctgagcttatcctgtgtggcctgcagccgcttccccaacttcagcatcctctactggctgggcaatggttccttcattgagcacctcccaggccgactgtgggaggggagcaccagccgggaacgtgggagcacaggtacgcagctgtgcaaggccttggtgctggagcagctgacccctgccctgcacagcaccaacttctcctgtgtgctcgtggaccctgaacaggttgtccagcgtcacgtcgtcctggcccagctctgggctgggctgagggcaaccttgccccccacccaagaagccctgccctccagccacagcagtccacagcagcagggttaagactcagcacagggccagcagcagcacaaccttgaccagagcttgggtcctacctgtctacctggagtgaacagtccctgactgcctgtaggctgcgtggatgcgcaacacaccccctccttctctgctttgggtcccttctctcaccaaattcaaactccattcccacctacctagaaaatcacagcctccttataatgcctcctcctcctgccattctctctccacctatccattagccttcctaacgtcctactcctcacactgctctactgctcagaaaccaccaagactgttgatgccttagccttgcactccagggccctacctgcatttcccacatgactttctggaagcctcccaactattcttgcttttcccagacagctcccactcccatgtctctgctcatttagtcccgtcttcctcaccgccccagcaggggaacgctcaagcctggttgaaatgctgcctcttcagtgaagtcatcctctttcagctctggccgcattctgcagacttcctatcttcgtgctgtatgttttttttttcccccttcactctaatggactgttccagggaagggatgggggcaccagctgcttcggatccacactgtatctgtgtcatccccacatgggtcctcataaaggattattcaatggaaaaaaaaaaaaaaaaaaaaaaaaaaaaaaaaaaaaaaa

SEQ ID NO: 506 - DNA, 795 bp, Homo sapiens
  Urocortin (UCN)
tgcgtccagtgctgcttccagcgctagccccaggggcacgaaggctggtgtagggaggtgcgcccctccgggggcccgccagccgtcagactcgaagctgtggctgtcattgcttctacaatcagtgcatgttcttcgctgacgtcagtcggagctgtcctggcactatataaggctggcgacagccccgggacagaccctgtgttccccaaggcgtcttcagcctgccccgagggacagagactggagctcaatcttggaccgtacagacgctcgccgacaacctggccggcggcaccatgaggcaggcgggacgcgcagcgctgctggccgcgctgctgctcctggtacagctgtgccctgggagcagccagaggagccccgaggcggccggggtccaggacccgagtctgcgctggagccccggggcacggaaccagggtggcggggcccgcgcgctcctcttgctgctggcggagcgcttcccgcgccgcgcggggcccggccgattgggactcgggacggcaggcgagcggccgcggcgggacaacccttctctgtccattgacctcacctttcacctgctgcggaccctgctggagctggcgcggacgcagagccagcgggagcgcgccgagcagaaccgcatcatattcgactcggtgggcaagtgatggcccggtttggggctgcgaaaacgttgacccctttcccccaccccagagttgggatgcggggcagagccaccagggcactgtctgcgtgactattttttaataaaagtactgaagaccc

SEQ ID NO: 507 - protein, 171 aa, Artificial Sequence
  Description of Artificial Sequence: Synthetic polypeptide
  I-1c (T35D)
MEQDNSPQKIQFTVPLLEPHLDPEAAEQIRRRRPDPATLVLTSDQSSPEIDEDRIPNPHLKSTLAMSPRQRKKMTRITPTMKELQMMVEHHLGQQQQGEEPEGAAESTGTQESRPPGIPDTEVESRLGTSGTAKKTAECIPKTHERGSKEPSTKEPSTHIPPLDSKGANSV

SEQ ID NO: 508 - DNA, 4292 bp, Homo sapiens
  HERG (LQT2, short QT - Ikr, Kv11.1; KCNH2)
aacccttccgcggccgggccgagccgcaggcgctgcccgagccgcgggcgctggagcggctgtcggcgcggtggcaggcgggagccaggagtccggggctcgggcgggcggagcgcagcgcggggacgcggcggagcgggccccgcggctcggcgggggccggcagacaggtgtgccggcggcgggcggctcgcgctcaggcggctccaggccgggcccggggtccggagcggggagccgggagccgagcgaggacccggcgcccgcagtccagtcttggccgcgcccgtgctcggcttggccgcggggtgcggggaccacggcccggccgggccacccgaagcctagtgctgggccgggccgggccggggtgggtgggggcccgcccggcccgcccatgggctcaggatgccggtgcggaggggccacgtcgcgccgcagaacaccttcctggacaccatcatccgcaagtttgagggccagagccgtaagttcatcatcgccaacgctcgggtggagaactgcgccgtcatctactgcaacgacggcttctgcgagctgtgcggctactcgcgggccgaggtgatgcagcgaccctgcacctgcgacttcctgcacgggccgcgcacgcagcgccgcgctgccgcgcagatcgcgcaggcactgctgggcgccgaggagcgcaaagtggaaatcgccttctaccggaaagatgggagctgcttcctatgtctggtggatgtggtgcccgtgaagaacgaggatggggctgtcatcatgttcatcctcaatttcgaggtggtgatggagaaggacatggtggggtccccggctcatgacaccaaccaccggggcccccccaccagctggctggccccaggccgcgccaagaccttccgcctgaagctgcccgcgctgctggcgctgacggcccgggagtcgtcggtgcggtcgggcggcgcgggcggcgcgggcgccccgggggccgtggtggtggacgtggacctgacgcccgcggcacccagcagcgagtcgctggccctggacgaagtgacagccatggacaaccacgtggcagggctcgggcccgcggaggagcggcgtgcgctggtgggtcccggctctccgccccgcagcgcgcccggccagctcccatcgccccgggcgcacagcctcaaccccgacgcctcgggctccagctgcagcctggcccggacgcgctcccgagaaagctgcgccagcgtgcgccgcgcctcgtcggccgacgacatcgaggccatgcgcgccggggtgctgcccccgccaccgcgccacgccagcaccggggccatgcacccactgcgcagcggcttgctcaactccacctcggactccgacctcgtgcgctaccgcaccattagcaagattccccaaatcaccctcaactttgtggacctcaagggcgaccccttcttggcttcgcccaccagtgaccgtgagatcatagcacctaagataaaggagcgaacccacaatgtcactgagaaggtcacccaggtcctgtccctgggcgccgacgtgctgcctgagtacaagctgcaggcaccgcgcatccaccgctggaccatcctgcattacagccccttcaaggccgtgtgggactggctcatcctgctgctggtcatctacacggctgtcttcacaccctactcggctgccttcctgctgaaggagacggaagaaggcccgcctgctaccgagtgtggctacgcctgccagccgctggctgtggtggacctcatcgtggacatcatgttcattgtggacatcctcatcaacttccgcaccacctacgtcaatgccaacgaggaggtggtcagccaccccggccgcatcgccgtccactacttcaagggctggttcctcatcgacatggtggccgccatccccttcgacctgctcatcttcggctctggctctgaggagctgatcgggctgctgaagactgcgcggctgctgcggctggtgcgcgtggcgcggaagctggatcgctactcagagtacggcgcggccgtgctgttcttgctcatgtgcacctttgcgctcatcgcgcactggctagcctgcatctggtacgccatcggcaacatggagcagccacacatggactcacgcatcggctggctgcacaacctgggcgaccagataggcaaaccctacaacagcagcggcctgggcggcccctccatcaaggacaagtatgtgacggcgctctacttcaccttcagcagcctcaccagtgtgggcttcggcaacgtctctcccaacaccaactcagagaagatcttctccatctgcgtcatgctcattggctccctcatgtatgctagcatcttcggcaacgtgtcggccatcatccagcggctgtactcgggcacagcccgctaccacacacagatgctgcgggtgcgggagttcatccgcttccaccagatccccaatcccctgcgccagcgcctcgaggagtacttccagcacgcctggtcctacaccaacggcatcgacatgaacgcggtgctgaagggcttccctgagtgcctgcaggctgacatctgcctgcacctgaaccgctcactgctgcagcactgcaaacccttccgaggggccaccaagggctgccttcgggccctggccatgaagttcaagaccacacatgcaccgccaggggacacactggtgcatgctggggacctgctcaccgccctgtacttcatctcccggggctccatcgagatcctgcggggcgacgtcgtcgtggccatcctggggaagaatgacatctttggggagcctctgaacctgtatgcaaggcctggcaagtcgaacggggatgtgcgggccctcacctactgtgacctacacaagatccatcgggacgacctgctggaggtgctggacatgtaccctgagttctccgaccacttctggtccagcctggagatcaccttcaacctgcgagataccaacatgatcccgggctcccccggcagtacggagttagagggtggcttcagtcggcaacgcaagcgcaagttgtccttccgcaggcgcacggacaaggacacggagcagccaggggaggtgtcggccttggggccgggccgggcgggggcagggccgagtagccggggccggccgggggggccgtggggggagagcccgtccagtggcccctccagccctgagagcagtgaggatgagggcccaggccgcagctccagccccctccgcctggtgcccttctccagccccaggccccccggagagccgccgggtggggagcccctgatggaggactgcgagaagagcagcgacacttgcaaccccctgtcaggcgccttctcaggagtgtccaacattttcagcttctggggggacagtcggggccgccagtaccaggagctccctcgatgccccgcccccacccccagcctcctcaacatccccctctccagcccgggtcggcggccccggggcgacgtggagagcaggctggatgccctccagcgccagctcaacaggctggagacccggctgagtgcagacatggccactgtcctgcagctgctacagaggcagatgacgctggtcccgcccgcctacagtgctgtgaccaccccggggcctggccccacttccacatccccgctgttgcccgtcagccccctccccaccctcaccttggactcgctttctcaggtttcccagttcatggcgtgtgaggagctgcccccgggggccccagagcttccccaagaaggccccacacgacgcctctccctaccgggccagctgggggccctcacctcccagcccctgcacagacacggctcggacccgggcagttagtggggctgcccagtgtggacacgtggctcacccagggatcaaggcgctgctgggccgctccccttggaggccctgctcaggaggccctgaccgtggaaggggagaggaactcgaaagcacagctcctcccccagcccttgggaccatcttctcctgcagtcccctgggccccagtgagaggggcaggggcagggccggcagtaggtggggcctgtggtccccccactgccctgagggcattagctggtctaactgcccggaggcacccggccctgggccttaggcacctcaaggacttttctgctatttactgctcttattgttaaggataataattaaggatcatatgaataattaatgaagatgctgatgactatgaataataaataattatcctgaggaga

SEQ ID NO: 509 - DNA, 3224 bp, Homo sapiens
  KCNQ1 (LQT - Iks; KCNA9)
agtggctgcccgcactgcgcccgggcgctcgccttcgctgcagctcccggtgccgccgctcgggccggccccccggcaggccctcctcgttatggccgcggcctcctccccgcccagggccgagaggaagcgctggggttggggccgcctgccaggcgcccggcggggcagcgcgggcctggccaagaagtgccccttctcgctggagctggcggagggcggcccggcgggcggcgcgctctacgcgcccatcgcgcccggcgccccaggtcccgcgccccctgcgtccccggccgcgcccgccgcgcccccagttgcctccgaccttggcccgcggccgccggtgagcctagacccgcgcgtctccatctacagcacgcgccgcccggtgttggcgcgcacccacgtccagggccgcgtctacaacttcctcgagcgtcccaccggctggaaatgcttcgtttaccacttcgccgtcttcctcatcgtcctggtctgcctcatcttcagcgtgctgtccaccatcgagcagtatgccgccctggccacggggactctcttctggatggagatcgtgctggtggtgttcttcgggacggagtacgtggtccgcctctggtccgccggctgccgcagcaagtacgtgggcctctgggggcggctgcgctttgcccggaagcccatttccatcatcgacctcatcgtggtcgtggcctccatggtggtcctctgcgtgggctccaaggggcaggtgtttgccacgtcggccatcaggggcatccgcttcctgcagatcctgaggatgctacacgtcgaccgccagggaggcacctggaggctcctgggctccgtggtcttcatccaccgccaggagctgataaccaccctgtacatcggcttcctgggcctcatcttctcctcgtactttgtgtacctggctgagaaggacgcggtgaacgagtcaggccgcgtggagttcggcagctacgcagatgcgctgtggtggggggtggtcacagtcaccaccatcggctatggggacaaggtgccccagacgtgggtcgggaagaccatcgcctcctgcttctctgtctttgccatctccttctttgcgctcccagcggggattcttggctcggggtttgccctgaaggtgcagcagaagcagaggcagaagcacttcaaccggcagatcccggcggcagcctcactcattcagaccgcatggaggtgctatgctgccgagaaccccgactcctccacctggaagatctacatccggaaggccccccggagccacactctgctgtcacccagccccaaacccaagaagtctgtggtggtaaagaaaaaaaagttcaagctggacaaagacaatggggtgactcctggagagaagatgctcacagtcccccatatcacgtgcgaccccccagaagagcggcggctggaccacttctctgtcgacggctatgacagttctgtaaggaagagcccaacactgctggaagtgagcatgccccatttcatgagaaccaacagcttcgccgaggacctggacctggaaggggagactctgctgacacccatcacccacatctcacagctgcgggaacaccatcgggccaccattaaggtcattcgacgcatgcagtactttgtggccaagaagaaattccagcaagcgcggaagccttacgatgtgcgggacgtcattgagcagtactcgcagggccacctcaacctcatggtgcgcatcaaggagctgcagaggaggctggaccagtccattgggaagccctcactgttcatctccgtctcagaaaagagcaaggatcgcggcagcaacacgatcggcgcccgcctgaaccgagtagaagacaaggtgacgcagctggaccagaggctggcactcatcaccgacatgcttcaccagctgctctccttgcacggtggcagcacccccggcagcggcggcccccccagagagggcggggcccacatcacccagccctgcggcagtggcggctccgtcgaccctgagctcttcctgcccagcaacaccctgcccacctacgagcagctgaccgtgcccaggaggggccccgatgaggggtcctgaggaggggatggggctgggggatgggcctgagtgagaggggaggccaagagtggccccacctggccctctctgaaggaggccacctcctaaaaggcccagagagaagagccccactctcagaggccccaataccccatggaccatgctgtctggcacagcctgcacttgggggctcagcaaggccacctcttcctggccggtgtgggggccccgtctcaggtctgagttgttaccccaagcgccctggcccccacatggtgatgttgacatcactggcatggtggttgggacccagtggcagggcacagggcctggcccatgtatggccaggaagtagcacaggctgagtgcaggcccaccctgcttggcccagggggcttcctgaggggagacagagcaacccctggaccccagcctcaaatccaggaccctgccaggcacaggcagggcaggaccagcccacgctgactacagggccgccggcaataaaagcccaggagcccatttggagggcctgggcctggctccctcactctcaggaaatgctgacccatgggcaggagactgtggagactgctcctgagcccccagcttccagcaggagggacagtctcaccatttccccagggcacgtggttgagtggggggaacgcccacttccctgggttagactgccagctcttcctagctggagaggagccctgcctctccgcccctgagcccactgtgcgtggggctcccgcctccaacccctcgcccagtcccagcagccagccaaacacacagaaggggactgccacctccccttgccagctgctgagccgcagagaagtgacggttcctacacaggacaggggttccttctgggcattacatcgcatagaaatcaataatttgtggtgatttggatctgtgttttaatgagtttcacagtgtgattttgattattaattgtgcaagcttttcctaataaacgtggagaatcacaggctgggctgggcactgctctcaccttggttcctggggcatccatggggtctctcacagacaggacccctgcagttcccctggaagcagtgcccaggtggctgtggaataggaa

SEQ ID NO: 510 - DNA, 8519 bp, Homo sapiens
  SCN5A (LQT3, Brugada)
agagccgcggagccgagacggcggcggcgcccgtaggatgcagggatcgctcccccggggccgctgagcctgcgcccagtgccccgagccccgcgccgagccgagtccgcgccaagcagcagccgcccaccccggggcccggccgggggaccagcagcttccccacaggcaacgtgaggagagcctgtgcccagaagcaggatgagaagatggcaaacttcctattacctcggggcaccagcagcttccgcaggttcacacgggagtccctggcagccatcgagaagcgcatggcagagaagcaagcccgcggctcaaccaccttgcaggagagccgagaggggctgcccgaggaggaggctccccggccccagctggacctgcaggcctccaaaaagctgccagatctctatggcaatccaccccaagagctcatcggagagcccctggaggacctggaccccttctatagcacccaaaagactttcatcgtactgaataaaggcaagaccatcttccggttcagtgccaccaacgccttgtatgtcctcagtcccttccaccccatccggagagcggctgtgaagattctggttcactcgctcttcaacatgctcatcatgtgcaccatcctcaccaactgcgtgttcatggcccagcacgaccctccaccctggaccaagtatgtcgagtacaccttcaccgccatttacacctttgagtctctggtcaagattctggctcgaggcttctgcctgcacgcgttcactttccttcgggacccatggaactggctggactttagtgtgattatcatggcatacacaactgaatttgtggacctgggcaatgtctcagccttacgcaccttccgagtcctccgggccctgaaaactatatcagtcatttcagggctgaagaccatcgtgggggccctgatccagtctgtgaagaagctggctgatgtgatggtcctcacagtcttctgcctcagcgtctttgccctcatcggcctgcagctcttcatgggcaacctaaggcacaagtgcgtgcgcaacttcacagcgctcaacggcaccaacggctccgtggaggccgacggcttggtctgggaatccctggacctttacctcagtgatccagaaaattacctgctcaagaacggcacctctgatgtgttactgtgtgggaacagctctgacgctgggacatgtccggagggctaccggtgcctaaaggcaggcgagaaccccgaccacggctacaccagcttcgattcctttgcctgggcctttcttgcactcttccgcctgatgacgcaggactgctgggagcgcctctatcagcagaccctcaggtccgcagggaagatctacatgatcttcttcatgcttgtcatcttcctggggtccttctacctggtgaacctgatcctggccgtggtcgcaatggcctatgaggagcaaaaccaagccaccatcgctgagaccgaggagaaggaaaagcgcttccaggaggccatggaaatgctcaagaaagaacacgaggccctcaccatcaggggtgtggataccgtgtcccgtagctccttggagatgtcccctttggccccagtaaacagccatgagagaagaagcaagaggagaaaacggatgtcttcaggaactgaggagtgtggggaggacaggctccccaagtctgactcagaagatggtcccagagcaatgaatcatctcagcctcacccgtggcctcagcaggacttctatgaagccacgttccagccgcgggagcattttcacctttcgcaggcgagacctgggttctgaagcagattttgcagatgatgaaaacagcacagcgggggagagcgagagccaccacacatcactgctggtgccctggcccctgcgccggaccagtgcccagggacagcccagtcccggaacctcggctcctggccacgccctccatggcaaaaagaacagcactgtggactgcaatggggtggtctcattactgggggcaggcgacccagaggccacatccccaggaagccacctcctccgccctgtgatgctagagcacccgccagacacgaccacgccatcggaggagccaggcgggccccagatgctgacctcccaggctccgtgtgtagatggcttcgaggagccaggagcacggcagcgggccctcagcgcagtcagcgtcctcaccagcgcactggaagagttagaggagtctcgccacaagtgtccaccatgctggaaccgtctcgcccagcgctacctgatctgggagtgctgcccgctgtggatgtccatcaagcagggagtgaagttggtggtcatggacccgtttactgacctcaccatcactatgtgcatcgtactcaacacactcttcatggcgctggagcactacaacatgacaagtgaattcgaggagatgctgcaggtcggaaacctggtcttcacagggattttcacagcagagatgaccttcaagatcattgccctcgacccctactactacttccaacagggctggaacatcttcgacagcatcatcgtcatccttagcctcatggagctgggcctgtcccgcatgagcaacttgtcggtgctgcgctccttccgcctgctgcgggtcttcaagctggccaaatcatggcccaccctgaacacactcatcaagatcatcgggaactcagtgggggcactggggaacctgacactggtgctagccatcatcgtgttcatctttgctgtggtgggcatgcagctctttggcaagaactactcggagctgagggacagcgactcaggcctgctgcctcgctggcacatgatggacttctttcatgccttcctcatcatcttccgcatcctctgtggagagtggatcgagaccatgtgggactgcatggaggtgtcggggcagtcattatgcctgctggtcttcttgcttgttatggtcattggcaaccttgtggtcctgaatctcttcctggccttgctgctcagctccttcagtgcagacaacctcacagcccctgatgaggacagagagatgaacaacctccagctggccctggcccgcatccagaggggcctgcgctttgtcaagcggaccacctgggatttctgctgtggtctcctgcggcagcggcctcagaagcccgcagcccttgccgcccagggccagctgcccagctgcattgccaccccctactccccgccacccccagagacggagaaggtgcctcccacccgcaaggaaacacggtttgaggaaggcgagcaaccaggccagggcacccccggggatccagagcccgtgtgtgtgcccatcgctgtggccgagtcagacacagatgaccaagaagaagatgaggagaacagcctgggcacggaggaggagtccagcaagcagcaggaatcccagcctgtgtccggtggcccagaggcccctccggattccaggacctggagccaggtgtcagcgactgcctcctctgaggccgaggccagtgcatctcaggccgactggcggcagcagtggaaagcggaaccccaggccccagggtgcggtgagaccccagaggacagttgctccgagggcagcacagcagacatgaccaacaccgctgagctcctggagcagatccctgacctcggccaggatgtcaaggacccagaggactgcttcactgaaggctgtgtccggcgctgtccctgctgtgcggtggacaccacacaggccccagggaaggtctggtggcggttgcgcaagacctgctaccacatcgtggagcacagctggttcgagacattcatcatcttcatgatcctactcagcagtggagcgctggccttcgaggacatctacctagaggagcggaagaccatcaaggttctgcttgagtatgccgacaagatgttcacatatgtcttcgtgctggagatgctgctcaagtgggtggcctacggcttcaagaagtacttcaccaatgcctggtgctggctcgacttcctcatcgtagacgtctctctggtcagcctggtggccaacaccctgggctttgccgagatgggccccatcaagtcactgcggacgctgcgtgcactccgtcctctgagagctctgtcacgatttgagggcatgagggtggtggtcaatgccctggtgggcgccatcccgtccatcatgaacgtcctcctcgtctgcctcatcttctggctcatcttcagcatcatgggcgtgaacctctttgcggggaagtttgggaggtgcatcaaccagacagagggagacttgcctttgaactacaccatcgtgaacaacaagagccagtgtgagtccttgaacttgaccggagaattgtactggaccaaggtgaaagtcaactttgacaacgtgggggccgggtacctggcccttctgcaggtggcaacatttaaaggctggatggacattatgtatgcagctgtggactccagggggtatgaagagcagcctcagtgggaatacaacctctacatgtacatctattttgtcattttcatcatctttgggtctttcttcaccctgaacctctttattggtgtcatcattgacaacttcaaccaacagaagaaaaagttagggggccaggacatcttcatgacagaggagcagaagaagtactacaatgccatgaagaagctgggctccaagaagccccagaagcccatcccacggcccctgaacaagtaccagggcttcatattcgacattgtgaccaagcaggcctttgacgtcaccatcatgtttctgatctgcttgaatatggtgaccatgatggtggagacagatgaccaaagtcctgagaaaatcaacatcttggccaagatcaacctgctctttgtggccatcttcacaggcgagtgtattgtcaagctggctgccctgcgccactactacttcaccaacagctggaatatcttcgacttcgtggttgtcatcctctccatcgtgggcactgtgctctcggacatcatccagaagtacttcttctccccgacgctcttccgagtcatccgcctggcccgaataggccgcatcctcagactgatccgaggggccaaggggatccgcacgctgctctttgccctcatgatgtccctgcctgccctcttcaacatcgggctgctgctcttcctcgtcatgttcatctactccatctttggcatggccaacttcgcttatgtcaagtgggaggctggcatcgacgacatgttcaacttccagaccttcgccaacagcatgctgtgcctcttccagatcaccacgtcggccggctgggatggcctcctcagccccatcctcaacactgggccgccctactgcgaccccactctgcccaacagcaatggctctcggggggactgcgggagcccagccgtgggcatcctcttcttcaccacctacatcatcatctccttcctcatcgtggtcaacatgtacattgccatcatcctggagaacttcagcgtggccacggaggagagcaccgagcccctgagtgaggacgacttcgatatgttctatgagatctgggagaaatttgacccagaggccactcagtttattgagtattcggtcctgtctgactttgccgatgccctgtctgagccactccgtatcgccaagcccaaccagataagcctcatcaacatggacctgcccatggtgagtggggaccgcatccattgcatggacattctctttgccttcaccaaaagggtcctgggggagtctggggagatggacgccctgaagatccagatggaggagaagttcatggcagccaacccatccaagatctcctacgagcccatcaccaccacactccggcgcaagcacgaagaggtgtcggccatggttatccagagagccttccgcaggcacctgctgcaacgctctttgaagcatgcctccttcctcttccgtcagcaggcgggcagcggcctctccgaagaggatgcccctgagcgagagggcctcatcgcctacgtgatgagtgagaacttctcccgaccccttggcccaccctccagctcctccatctcctccacttccttcccaccctcctatgacagtgtcactagagccaccagcgataacctccaggtgcgggggtctgactacagccacagtgaagatctcgccgacttccccccttctccggacagggaccgtgagtccatcgtgtgagcctcggcctggctggccaggacacactgaaaagcagcctttttcaccatggcaaacctaaatgcagtcagtcacaaaccagcctggggccttcctggctttgggagtaagaaatgggcctcagccccgcggatcaaccaggcagagttctgtggcgccgcgtggacagccggagcagttggcctgtgcttggaggcctcagatagacctgtgacctggtctggtcaggcaatgccctgcggctctggaaagcaacttcatcccagctgctgaggcgaaatataaaactgagactgtatatgttgtgaatgggctttcataaatttattatatttgatatttttttacttgagcaaagaactaaggatttttccatggacatgggcagcaattcacgctgtctcttcttaaccctgaacaagagtgtctatggagcagccggaagtctgttctcaaagcagaagtggaatccagtgtggctcccacaggtcttcactgcccaggggtcgaatggggtccccctcccacttgacctgagatgctgggagggctgaacccccactcacacaagcacacacacacagtcctcacacacggaggccagacacaggccgtgggacccaggctcccagcctaagggagacaggcctttccctgccggccccccaaggatggggttcttgtccacggggctcactctggccccctattgtctccaaggtcccattttccccctgtgttttcacgcaggtcatattgtcagtcctacaaaaataaaaggcttccagaggagagtggcctgggtcccagggctggccctaggcactgatagttgccttttcttcccctcctgtaagagtattaacaaaaccaaaggacacaagggtgcaagccccattcacggcctggcatgcagcttgtccttgctcctggaacctggcaggccctgcccagccagccatcggaagagagggctgagccatgggggtttggggctaagaagttcaccagccctgagccatggcggcccctcagcctgcctgaagagaggaaactggcgatctcccagggctctctggaccatacgcggaggagttttctgtgtggtctccagctcctctccagacacagagacatgggagtggggagcggagcttggccctgcgccctgtgcagggaaagggatggtcaggcccagttctcgtgcccttagaggggaatgaaccatggcacctttgagagagggggcactgtggtcaggcccagcctctctggctcagcccgggatcctgatggcacccacacagaggacctctttggggcaagatccaggtggtcccataggtcttgtgaaaaggctttttcagggaaaaatattttactagtccaatcacccccaggacctcttcagctgctgacaatcctatttagcatatgcaaatcttttaacatagagaactgtcaccctgaggtaacagggtcaactggcgaagcctgagcaggcaggggcttggctgccccattccagctctcccatggagcccctccaccgggcgcatgcctcccaggccacctcagtctcacctgccggctctgggctggctgctcctaacctacctcgccgagctgtcggagggctggacatttgtggcagtgctgaagggggcattgccggcgagtaaagtattatgtttcttcttgtcaccccagttcccttggtggcaaccccagacccaacccatgcccctgacagatctagttctcttctcctgtgttccctttgagtccagtgtgggacacggtttaactgtcccagcgacatttctccaagtggaaatcctatttttgtagatctccatgctttgctctcaaggcttggagaggtatgtgcccctcctgggtgctcaccgcctgctacacaggcaggaatgcggttgggaggcaggtcgggctgccagcccagctggccggaaggagactgtggtttttgtgtgtgtggacagcccgggagctttgagacaggtgcctggggctggctgcagacggtgtggttgggggtgggaggtgagctagacccaacccttagcttttagcctggctgtcacctttttaatttccagaactgcacaatgaccagcaggagggaaggacagacatcaagtgccagatgttgtctgaactaatcgagcacttctcaccaaacttcatgtataaataaaatacatatttttaaaacaaaccaataaatggcttacatga

SEQ ID NO: 511 - DNA, 14215 bp, Homo sapiens
  ANK2 (Ankyrin B; LQT4)
aagtgcatacccgctagtggtctgtacaggcggcacggtttgatggcagagatattttctttccaaactgttcaaaatgatgaacgaagatgcagctcagaaaagcgacagtggagagaagttcaacggcagtagtcagaggagaaaaagacccaagaagtctgacagcaatgcaagcttcctccgtgctgccagagcaggcaacctggacaaagttgtggaatatctgaaggggggcatagacatcaatacctgcaatcagaatggactcaacgctctccatctggctgccaaggaaggccacgtggggctggtgcaggagctgctgggaagagggtcctctgtggattctgccactaagaagggaaataccgctcttcacattgcatctttggctggacaagcagaagttgtcaaagttcttgttaaggaaggagccaatattaatgcacagtctcagaatggctttactcctttatacatggctgcccaagagaatcacattgatgttgtaaaatatttgctggaaaatggagctaatcagagcactgctacagaggatggctttactcctctagctgtggcactccagcaaggacacaaccaggcggtggccatcctcttggagaatgacaccaaagggaaagtgaggctgccagctctgcatattgccgctaggaaagacgacaccaaatctgccgcacttctgcttcagaatgaccacaatgctgacgtacaatccaagatgatggtgaataggacaactgagagtggttttacccctttgcacatagctgcacattacggaaatgtcaacgtggcaactcttcttctaaaccggggagctgctgtggacttcacagccaggaatggaatcactcctctgcatgtggcttccaaaagaggaaatacaaacatggtgaagctcttactggatcgaggcggtcagatcgatgccaaaactagggatgggttgacaccacttcactgtgctgcacgaagtgggcatgaccaagtggtggaacttctgttggaacggggtgcccccttgctggcaaggactaagaatgggctgtctccactacacatggctgcccagggagaccacgtggaatgtgtgaagcacctgttacagcacaaggcacctgttgatgatgtcaccctagactacctgacagccctccacgttgctgcgcactgtggccactaccgtgtaaccaaactccttttagacaagagagccaatccgaacgccagagccctgaatggttttactccactgcacattgcctgcaagaaaaaccgcatcaaagtcatggaactgctggtgaaatatggggcttcaatccaagctataacagagtctggcctcacaccaatacatgtggctgccttcatgggccacttgaacattgtcctccttctgctgcagaacggagcctctccagatgtcactaacattcgtggtgagacggcactacacatggcagcccgagccgggcaggtggaagtggtccgatgcctcctgagaaatggtgcccttgttgatgccagagccagggaggaacagacacctttacatattgcctcccgcctgggtaagacagaaattgtccagctgcttctacaacatatggctcatccagatgcggccactacaaatgggtacacaccactgcacatctctgcccgggagggccaggtggatgtggcatcagtcctattggaagcaggagcagcccactccttagctaccaagaagggttttactcccctgcatgtagcagccaagtatggaagcctggatgtggcaaaacttctcttgcaacgccgtgctgccgcagattctgcagggaagaacggccttaccccgctccatgttgctgctcattatgacaaccagaaggtggcgctgctgttactggagaagggtgcttcccctcatgccactgccaagaatggctatactccgttacatattgctgccaagaagaatcaaatgcagatagcttccacactcctgaactatggagcagagacaaacattgtgacaaagcaaggagtaactccactccatctggcctcgcaggaggggcacacagatatggttaccttgcttctggataagggagccaatatccacatgtcaactaagagtggactcacatccttacaccttgcagcccaggaagataaagtgaatgttgctgatattctcaccaagcatggagctgatcaggatgctcatacaaagcttggttacacacctttaattgtggcctgtcactatggaaatgtgaaaatggtcaactttcttctgaagcagggagcaaatgttaacgcaaaaaccaagaacggctacacgcctttgcaccaggccgctcagcagggtcacacgcacatcatcaacgtcctgctccagcatggggccaagcccaacgccaccactgcgaatggcaacactgccttggcgattgctaagcgtctgggctacatctccgtggtcgacaccctgaaggttgtgactgaggaggtcaccaccaccaccacaactattacagaaaaacacaaactaaatgtacctgagacgatgactgaggttcttgatgtttctgatgaagagggtgatgacacaatgactggtgatgggggagaataccttaggcctgaggacctaaaagaactgggtgatgactcactacccagcagtcagttcctggatggtatgaattacctgcgatacagcttggagggaggacgatctgacagccttcgatccttcagttccgacaggtctcacactctgagccatgcctcctacctgagggacagtgccgtgatggatgactcagttgtgattcccagtcaccaggtgtcaactctagccaaggaggcagaaaggaattcttatcgcctaagctggggcactgagaacttagacaacgtggctctttcttctagtcctattcattcaggtttcctggttagttttatggtggatgcccgaggtggtgctatgcgaggatgcagacacaatgggctccgaatcattattccacctcggaaatgtactgctccaacgcgagtcacctgccgactggtcaagcgccacagactggcaacaatgcctccaatggtggaaggagaaggcctggccagtcgcctgatcgaagttggaccttctggtgctcagttccttggtaaacttcacctgccaacggctcctcccccacttaatgagggagaaagtttggtcagccgcattcttcagctggggcctcctggaaccaaattccttgggcctgtgatcgtggagatccctcactttgcggcccttcgaggaaaggaaagggaactggtggtcctgcgcagtgagaatggggacagctggaaagagcatttctgtgactacactgaagatgaattgaatgaaattcttaacggcatggatgaagtactggatagcccagaagacctagaaaagaaacgaatctgccgcatcatcacccgagacttcccacagtactttgcagtggtgtctcgtatcaaacaggacagcaatctgattggcccagaaggaggtgtactgagcagcacagtggtgccccaggtgcaggccgtcttcccagagggggcactcaccaagcggatccgcgtaggcctgcaggctcaacctatgcacagtgagctggttaagaagatcctaggcaacaaagctaccttcagccctatagtcactttggaacctagaagaagaaaattccacaaaccaattaccatgaccattcctgtccccaaagcttcaagtgatgtcatgttgaatggttttgggggagatgcaccaaccttaagattactatgcagcataacaggtggaaccacccctgcccagtgggaagatattacaggaactacgccattaacatttgtcaatgaatgtgtttcctttacaacaaacgtgtctgccaggttctggctgatagattgtcgacagatccaggaatccgttacttttgcatcacaagtatacagagaaattatctgcgtaccttatatggccaaatttgtagtgtttgccaaatcacatgaccccattgaagccaggttgaggtgtttctgcatgactgatgataaagtggataagacccttgaacaacaagaaaattttgctgaggtggccagaagcagggatgtggaggtgttagaaggaaaacccatctacgttgattgtttcggcaacttggtaccattaactaaaagtggccagcatcatatattcagtttttttgccttcaaagaaaatagacttcctctatttgtcaaggtacgcgatacgactcaggaaccttgcggacgactatcatttatgaaggagccaaaatccacgagaggcctggtgcatcaagctatttgcaacttaaacatcactttgccgatttatacaaaggaatcagagtcagatcaagaacaggaggaagagatcgatatgacatcagaaaaaaatgatgagacagaatctacagaaacatctgtcctgaaaagtcacctggttaatgaagttcctgtcctagcaagtccggacttgctctctgaagtttctgagatgaaacaagatttgatcaaaatgaccgccatcttgaccacagatgtgtctgataaggcaggttctattaaagtgaaggagctggtgaaggctgctgaggaagagccaggagagccttttgaaatcgttgaaagagttaaagaggacttagagaaagtgaatgaaatcctgagaagtggaacctgcacaagagatgaaagcagtgtgcagagctctcggtctgagagaggattagttgaagaggaatgggttattgtcagtgatgaggaaatagaagaggctaggcaaaaagcacctttagaaatcactgaatatccatgtgtagaagttagaatagataaagagatcaaaggaaaagtagagaaagactcaactgggctagtgaactaccttactgatgatctgaatacctgtgtgcctcttcccaaagagcagctgcagacagttcaagataaggcagggaagaaatgtgaggctctggctgttggcaggagctctgaaaaggaagggaaagacatacccccagatgagacacagagtacacagaaacagcacaaaccaagcttgggaataaagaagccagtaagaaggaaattaaaagaaaagcagaaacaaaaagaggaaggtttacaagctagtgcagagaaagctgaacttaaaaaaggtagttcagaagagtcattaggtgaagacccaggtttagcccctgaaccccttcccactgtcaaggccacatctcctttgatagaagaaactcccattggttccataaaggacaaagtaaaggcccttcagaagcgagtggaagatgaacagaaaggtcgaagcaagttgcccatcagagtcaaaggcaaggaggacgtgccaaaaaagaccacccacaggccacatccagctgcgtcaccctctctgaagtcagagagacatgcgccagggtctccctcccctaaaacagaaagacactctactctttcctcttccgcaaaaactgaaaggcaccctccagtatcaccatcaagtaaaactgagaaacactcacctgtgtcaccctctgcaaaaacggaaagacattcacctgcgtcatcatcgagtaaaactgagaaacactcacctgtatcaccctcgacaaaaactgaaaggcactctcctgtgtcatctacaaaaacagaaagacacccacctgtttcgccttcaggcaaaacagacaaacgtccacctgtatcgccctccgggaggacagaaaaacacccgccagtatcgcctgggagaacagaaaaacgcttgcctgtttcaccctccggaagaacggacaagcaccaacctgtatcaacagctgggaaaactgagaagcacctgcctgtgtcaccttctggcaaaacagaaaagcaaccacctgtatcccccacttcaaaaacagagaggattgaggaaaccatgtctgttcgggagctgatgaaggctttccagtcaggtcaggacccttctaaacataaaactggactctttgagcacaaatcagcaaaacaaaagcagccacaagagaaaggtaaagttcgggtagaaaaagaaaaggggccgatactaacccagagagaagctcagaaaacagagaatcagacaatcaaacgaggccagagactcccggtaacgggcacagcagaatccaaaagaggagttcgtgtttcctccataggagttaagaaagaagatgcagctggaggaaaggagaaagttctcagccacaaaatacctgaacctgttcagtcagtgcctgaagaagaaagccacagagagagcgaagtgcccaaagaaaagatggctgatgagcagggagacatggatctacagatcagcccagataggaaaacctccactgacttctctgaggtcattaagcaagagttggaagacaatgacaaataccaacaattccgcctgagtgaggagacagaaaaggcacagcttcacttagaccaagtactcactagtcctttcaacacaacatttccactcgactacatgaaagatgagttccttccagctctgtctttacaaagcggtgctttagatggcagttctgaaagcctaaagaatgagggggtagccggctctccgtgtggcagcctgatggaggggacccctcagattagttcagaagaaagctataagcatgaaggcctagcagagacccctgagacgagcccagaaagcctttctttctcaccaaagaaaagtgaggagcaaactggggaaacaaaggaaagcaccaagacagaaaccaccacagaaattcgttcagaaaaagagcatcccacgaccaaagacattactggtggctctgaagagcgaggtgccacagtcactgaggactcagagacctctactgagagttttcagaaagaggccactctaggctctcccaaagacacaagccctaaaagacaagatgattgcacaggcagctgtagtgtagcattagctaaagagacacctacaggactgactgaggaggcagcctgtgatgaaggtcaacgtacctttggtagttcagcccacaagacacaaactgatagtgaggttcaagaatccacagccacctcagacgagacaaaggccttgccgctgcctgaggcttctgtaaagacagatacaggaactgaatcaaaacctcagggagtcattagaagtccccaagggttagaacttgcactccctagccgagatagcgaagtcctcagcgctgtggctgatgactcattagcagtgagccacaaagactctctggaagccagccctgtgctagaagataactcttcacacaaaacccctgattctctggagccaagtcctctgaaagaatccccttgccgtgactctctggaaagcagccctgttgaaccaaagatgaaggctggaatttttccaagtcactttcctcttcctgcagctgttgccaaaacagaactcttgacggaagtggcctctgtgcggtcccggctactccgagaccctgatggcagtgctgaggatgacagtcttgagcagacatcgctcatggagagctcagggaagagccccctttctcctgacacccccagctctgaagaagtcagctatgaggttacacccaaaaccacagatgtaagtacaccaaaaccagctgtgattcatgaatgtgcagaggaggatgattcagaaaacggggagaaaaagaggttcacacctgaagaggagatgtttaaaatggtaaccaaaatcaaaatgtttgatgaacttgaacaagaagcaaagcagaaaagggactacaaaaaagaacccaaacaagaagaatcttcttcatcttctgacccagatgctgactgttcagtagatgtggatgaaccaaaacatacaggcagtggggaggatgaaagtggtgtccctgtgttagtaacttcggagagcaggaaggtgtcttcctcctcagaaagtgaacctgagttggcacagcttaaaaaaggtgctgactcaggccttttaccagaaccagtgattcgagtacaacctccttctccacttccatcaagcatggactccaattccagtccagaagaagtacaattccagcctgtcgtttccaaacaatatactttcaagatgaatgaagatactcaggaagagccaggcaaatcagaagaagaaaaagattctgaatcccatttagctgaagaccgtcatgctgtttccactgaggctgaagacaggtcttatgataagctaaacagagacactgatcagccaaaaatctgtgatggccatggatgtgaggccatgagtcctagcagctcagctgctcctgtctcttcaggtctacagagtccgactggtgatgatgttgatgaacagccagtcatctataaagaatcattagctctccaaggcactcatgaaaaagacacagagggagaagagcttgatgtttctagagcagaatctccacaagcagattgccccagtgaaagcttttcatcttcatcctctttgcctcattgtttggtatctgaaggaaaagaattagatgaagacatatctgccacatcttctattcaaaaaacagaggtcacaaaaactgatgaaacatttgagaacttaccaaaggactgcccctctcaagactcatccattactactcaaacagatagattttccatggatgttcccgtgtctgacctagctgagaatgatgaaatctatgatccacaaatcactagcccttatgaaaatgtcccttcccaatcttttttctctagtgaagaaagcaaaacccaaacagatgcaaatcacaccacaagttttcactcttctgaagtgtattctgttaccatcacatcccctgttgaagacgttgtagtggcaagctcctctagtggaactgttttaagcaaagaatctaattttgagggccaggacataaaaatggaatcccaacaggaaagtaccttgtgggaaatgcaatcagacagtgtctcttcatctttcgagcctactatgtccgctacaacaacagttgttggtgaacaaataagcaaagtcatcatcacaaaaactgatgtggattctgattcttggagtgaaattcgggaagacgatgaagcctttgaggctcgtgtgaaagaggaagaacaaaagatatttggtttgatggtagacagacaatcacagggtaccacccctgacaccactcctgctaggaccccaactgaagaggggaccccaacaagtgagcaaaacccatttctgtttcaggaaggaaaattgtttgaaatgacccgaagtggtgccattgatatgaccaaaaggtcctatgcagatgaaagttttcactttttccaaattggtcaagaatccagggaagagactctctctgaagatgtgaaagaaggggctactggggctgatcccctaccgctggagacatcagctgaatcactagcactttcagaatcaaaagaaacagtggatgatgaggcagacttacttccagatgacgtgagtgaggaagtagaggaaatacctgcttcggatgctcaacttaactcccaaatggggatttcagcctccactgaaacacctacaaaagaagctgttagtgtagggaccaaggacctccccaccgtgcaaacgggtgatatacctcctctctctggtgtaaagcagatatcctgccccgactcttctgaaccagctgtacaagtccagttagatttttccacactcaccaggtctgtttattcagataggggtgatgattctcccgattcttccccagaagaacagaaatcagtaatcgagattcctactgcacccatggagaatgtgccttttactgaaagcaaatccaaaattcctgtaaggactatgcccacttccaccccagcacctccatctgcagagtatgagagttcagtttctgaagattttctatccagtgtagatgaggaaaataaggcggatgaagcaaaaccaaagtccaaactccctgtcaaagtacccctccaaagagttgaacagcagctctcagatctagacacctctgtccagaagacagtggctcctcagggacaggacatggcaagcatcgcaccagataatagaagcaaatctgaatctgatgctagttctttggattcaaagaccaaatgcccagtaaaaacccgaagttacactgagacagaaacagagagcagagagagggccgaggaacttgagttagaatcagaagaaggggccacaagaccaaagatacttacatcccgattgccagttaagagcagaagcactacatcttcctgcagggggggcacgagccccacaaaagaaagtaaggagcatttctttgacctttacagaaattccatagaattctttgaggagattagtgatgaggcttccaaattagtggataggctgacacagtcagagagggagcaggaaatagtttcagacgatgaaagtagtagtgccctggaagtatcagtaattgaaaatctgccacctgttgagaccgagcactcagttcctgaggacatctttgacacaaggcccatttgggatgagtctattgagactctgattgaacgcatccctgatgaaaatggccatgaccatgctgaagatccacaggatgagcaggaacggatcgaggaaaggctggcttatattgctgatcaccttggcttcagctggacagaattagcaagagaactggatttcactgaggagcaaattcatcaaattcgaattgaaaatcccaactctcttcaagaccagagtcatgcactgttgaagtactggctagagagggatgggaaacatgctacagataccaacctcgttgaatgtctcaccaagatcaaccgaatggatattgttcatctcatggagaccaacacagaacctctccaggagcgcatcagtcatagttatgcagaaattgaacagaccattacactggatcatagtgaagggttctcggtacttcaagaggagttatgcactgcacagcacaagcagaaagaggagcaagctgtttctaaagaaagtgagacctgcgatcaccctcctatcgtctcagaggaagacatttctgttggttattccacttttcaggatggcgtccccaaaactgagggggacagctcagcaacagcactctttccccaaactcacaaggagcaagttcaacaggatttctcagggaaaatgcaagacctgcctgaagagtcatctctggaatatcagcaggaatattttgtgacaactccaggaacagaaacatcagagactcagaaggctatgatagtacccagctctcccagcaagacacctgaggaagttagcacccctgcagaggaggagaagctgtacctccagaccccaacatccagcgagcggggaggctctcccatcatacaagaacccgaagagccctcagagcacagagaggagagctctccgcggaaaaccagcctcgtaatagtggagtctgccgataaccagcctgagacctgtgaaagactcgatgaagatgcagcttttgaaaagggagacgatatgcctgaaatacccccagaaacagtcacagaagaagaatacattgatgagcatggacacaccgtggtaaagaaggttactaggaaaatcattaggcggtatgtatcctctgaaggcacagagaaagaagagattatggtgcagggaatgccacaggaacctgtcaacatcgaggaaggggatggctattccaaagttataaagcgtgttgtattgaagagtgacaccgagcagtcagaggacaacaatgagtaaagccatcacacagaagagggctgtggtgaaggaccagcatggaaaacgcattgacttggagcacctggaggatgtaccagaagcactagaccaggacgacctccagcgcgatctccagcagctccttcggcatttctgcaaggaggacttgaagcaagaggccaagtgaggggctgcccagttctcacaccagaaaccacacattcactcaatatgcagcttcctgtttcagtaggggagtgacctaactggcctaattaatgggataccccgacatttccactgttagcaaatatacggcattttgctttagttttcccccatcctctttaactataaagctaatttgtgaccaaagatggcatccttcatactggatgctgtatccaatactttgttgtgtctgtgctaacctgggaactggccacctccattgttctttgcttctgcacaagatccatgaaaatccattgatcagaagaacttcacctgcagacctcttcaagtgacactatgtaggaatccttccaaggaatatctatgtacaatgtatatagctgaaatgctcagatgaacaacatattaaaattaaaaccactgcctattgtaactacactgggcatcagaataaaaggcctctagaaattgctgaacaatggttaattaagatattgctaacacaatcgagtgataatacagttttactgcaaaagaagcacttcaaacctattatgtccttagaacttccagagtagccactgctcccagttaaaggtgggtcagtagccttgcagaactgtcctgagaagttattgctggtgctggccagccatggcttaggactccaacagccactctgagggaggggagaagggagcagaggccacgcagaatgaaccgatggggtattcagttgctggcagctacattgtgtggcattctagcatcttcaggtctttagatcttggacaagttggcagggtattttaaaagctataactactgtagttttccagttttcattgctgctttagcaaaccacgctgtcttacagtggtactttcttctggccactgcactgtagataattcattggaaacaagatttacccactacataaaaggttaaactccttcagtatgttggagtggtttctttttttttttctttctttcttttttttcttcaggtttatatcttctctaatacctgcatgtggcgtttaaaaatcaagaccacggtcaaacccctcttctaatcacattaattgtttccattctttttaccctgagtgagcacttttcactttccagctaggtctgtttttcagcttgcagacaagattgagaaatccttgaaaatttggttttggttaaaatttttggtttatttatttgaaatccacactcccttggaaactcttaagtgcatttgtgcacttctgtttgtttgtctcaaagaagggactgtaacaatctgagtaatttccatgtcctcttccttattcctctagtggttgaagctgtgtagcattttaacatatatatattcacaaatatattcatataaacagtatacattttgaatcagtcatttgttaaagaaaagtatattcaatgaagatgaaatttaaataaaaaaggacagagtctatcctccagggattgaacattttccaattatctggtcttttcctgttgtgcaaaaatgactcattgctccgaatgtcaaaaacaaatgcgacaaacaatggcacttcatcatttaaagtaatgttgccaagagaaaaaatttcctgggagggaggtttcccacaagccaaatctcctaagcctcaaatgctagcactttttggcagttggataggaaatgagacattctttggcagccaaaataagagaggccgatggtgaaactttttgagacaccctatggccttcttgtcaaaaccttcactggagctcaagaaaagcatttctgttgtgttatttgcagtgcagatgatgtctgtgtaacaacataatggttattcacctttttttgattttgatttttgctgtgttatcaaaaacttgaatactgtgagaagaagtgaattttcagttgacgaatcagcatcttgttcccatggtgataacactaattgaatatatctatgagggcatgtattagttaatggaaaaaaaaatacaacactaacaatacatagctgcaatgtgtacaatggctgatttaattaaataaaatgtacaagtgttaaatgtg

SEQ ID NO: 512 - DNA, 3505 bp, Homo sapiens
  KCNE1 (LQT5; MinK, ISK, JLNS2)
gcatttgacacttgactgggatacactaccggatcctccgagggtgatggttctcaagaaggcagaagcaatggtgaccaatagacctccttaaaggctgagccgctgggcaccttcctactcctctcgaccgtgctaggatgactgcagcagagtccccgagtcctttgatgcaagggtctagcaaccaccaaacagacaagcccttcggcctgtcctggagggcgttgaatggcatggcctggagctcaaccaggagaaccgtgctcaggaggaagagaccagaaggataactcaaaaagttctgagaagttcctaagaccacctgaagagaaggagcctgctgccaatggtgtggacaccgcagtgtgcttgaggagacttcagaaacgagaactggaaaaatccctctgctttctctggccagtttcacacaatcatcaggtgagccgaggatccattggaggaaggcattatctgtatccagaggaaatagccaaggatattcagaggtgtgcctgggaagtttgagctgcagcagtggaaccttaatgcccaggatgatcctgtctaacaccacagcggtgacgccctttctgaccaagctgtggcaggagacagttcagcagggtggcaacatgtcgggcctggcccgcaggtccccccgcagcagtgacggcaagctggaggccctctacgtcctcatggtactgggattcttcggcttcttcaccctgggcatcatgctgagctacatccgctccaagaagctggagcactcgaacgacccattcaacgtctacatcgagtccgatgcctggcaagagaaggacaaggcctatgtccaggcccgggtcctggagagctacaggtcgtgctatgtcgttgaaaaccatctggccatagaacaacccaacacacaccttcctgagacgaagccttccccatgaaccccaccactggctaaaactggacacatcctgcctggcaacctgattttctaatcacattcctctcatactctttattgtgatggataccactggatttctttttggctgttgtaaggggtgaggggtggattaatgacactgtttcactgtttctctaaaatcacgttcttttgtgatagactgtcagtggttcccccatatctgtccctgccttgctaaatttagcagaatccctgaggacatggcctctgagaatagcagctgcatttcccagactcccttgcagctagcaaggttgtgtgactaagccctggccagtaggcatggaagtgaagactgtaatgtccaagtaatccttggaaagaaaagaacgtgcccttaactaactttgtcctgcttcccagtggctggatgtggaggaggtggagagcagttatgagactgggaaagaacggggcactcaaagagccacacacatctgggcctgggcgacgtggatcctccttaccacccaccaggccagatttacaggagagagaaatccactccactcttccttaagccactgttattctgatctctgttaaggtcgcagaatcaatgcccttactgatacacctaccttataggactgaacctaaaggcatgacatttccatacttgtcacaagcacacactgattctgcccttgtcacttctgtgctcactcttgtggctctatcctcctcctgcccttccgccttccactcctcccttgcacccatcctgcacacatctccctgaaaacacacaggcacatacactcatatacatagacacacatacacacctcaatctagaaagaacttgctttgtacagggctgagatggaggagaaaaaaatgcccccttcagaatgcataccaaggggaaggtgctcggtcactgtgggagcagggaaaggtgcccccactccccgagagccaggggaaggagtggctctgggcagagagggacacatagcactggggtggcaggtccttttgaggtgatgggccggttttgtgagatgaattgtatcccccaaaaagacaggtaccttcaatgtgacctaattgggaaatagagtctttgcagatgatctagttgagatgaggtcattggggtgggccctcacccaatatgactggagtccttatcggaagagggaaattcagacacagatgcatagggaggacaccatgccgtgacagaggcagagggtgcagtgacacagccacaaaccaaggaaggccgaggatggatgcgcatccccatcccaagaagtcgggaagaagccaggaaggctcctctcccacaggtttcagaggaagcacagccctgcttgaattcaaacttttggcctccagaactgtgagtcagtacctgttgttgaagccacccagcttaggatactctggcagcctactgccatacagtattgggatactatagtgagcccatgcagcacctctcacccacccagagatggagctgctctgccttccagcggggcacccggagggctgccccagcagatagagagggcctccgttctgccacctgccttgaaagggtctccagctgccatatgtagcattggagtcctctgcaatgcgacatcctgaaagctcagctgcctgggcattcctgaagagtatggaatatttaaatgaaacatatttttttaaaacctgcgcataagataaaagcagcccgtgtgcatcttgggccatcctcaaatggacagacttggtcttgtgaggttccagtccttgtttcacataataaacactggcatggctcagcccctgagttaccacagtccttgagatgagtggttctttgggttacaaagtcctctgaaagtctagtgagagctgtgatctttgccccacccgaataatgcatatggacaccacaccttgcctgccgtgtccaggattcatgaccagtagcagcccagctatgcctgccacgtctcacggcccctgtgtaagccagacccttcttaggcagttgcatattcccagactgaggcagggcaggtttgcagagagagacccagagtgcacgtgacccgcagtgtgatccctggcacgcactgactttgatattccaggcacacggactggctatttatcaccacttctttttccccactaagattcctgtgccttttaaggcagagggagatccctatggcgttagtcttcccaggccttaaagggcccttgtcttcactcacaaacctcttatctcttcttctccttcctctacattttaaagggggagagggaaaagtaaccgggagacaaattgagccacatattttcagacacttgttaccatattttaaaatctggcttcacatacacagagtctttgctatgcaccatgtactgttctaagcttcttaaaaatagaatctcaattattattttgcaggcaatactctatgcattcattagctaggacaacaatgcatttgcagtagtgagatttcgctaaaaaattaaagccatttactatga

SEQ ID NO: 513 - DNA, 1061 bp, Homo sapiens
  KCNE2 (LQT6; MiRP1)
gcaagggcttagatggttgtaaggtgaaggtgcccagcaggctgaggcttgtgtgcaacccagaagagagctcgctaacgccagcaagaaggttcagaacagcctggctttggaaaggaatttcatcctgcccacacactgcatagcaggagggaagcatgtctactttatccaatttcacacagacgctggaagacgtcttccgaaggatttttattacttatatggacaattggcgccagaacacaacagctgagcaagaggccctccaagccaaagttgatgctgagaacttctactatgtcatcctgtacctcatggtgatgattggaatgttctctttcatcatcgtggccatcctggtgagcactgtgaaatccaagagacgggaacactccaatgacccctaccaccagtacattgtagaggactggcaggaaaagtacaagagccaaatcttgaatctagaagaatcgaaggccaccatccatgagaacattggtgcggctgggttcaaaatgtccccctgataagggagaaaggcaccaagctaacatctgacgtccagacatgaagagatgccagtgccacgaggcaaatccaaattgtctttgcttagaagaaagtgagttccttgctctctgttgagaattttcatggagattatgtggttggccaataaagatagatgacatttcaatctcagtgatttatgcttgcttgttggagcaatattttgtgctgaagacctcttttactttccgggcaagtgaatgtcattttaatcaatatcaatgatgaaaataaagccaaatttgaagtaaagtgtctgggcagtggctgtggggatagaaaggagagatttacaaatcattgaatcttctttctcatgaaacatcatttgtgtgtgacaaattcaatttataaataacccagatgtattatgtagaagctgaggctcaaaagctatcacttgcttaccagacggacataggagcatttatctgtaatattaattcatgagtgtggagtctgaagagatgaataaacaaaccataaga

SEQ ID NO: 514 - DNA, 5391 bp, Homo sapiens
  KCNJ2 (LQT7, short QT; Kir2.1, IRK1)
agagcgcactggagccctggccagcgcgcagccttcccggcgccggcgggctgggtcttgggaattctggtttgctttggctcactcgctttttacaaaccactggatcttacatgcctctgtaccccccacttccactccatgtccccatgctcctgcgccagcaacaggacatgttctctggatgtcagctgagtcattaaagtaactctgcatgtcagtagacagaccttggtagaaccacaaggctcccagagacacccatctctcctcatttttttggtgtgtgtgtcttcaccgaacattcaaaactgtttctccaaagcgttttgcaaaaactcagactgttttccaaagcagaagcactggagtccccagcagaagcgatgggcagtgtgcgaaccaaccgctacagcatcgtctcttcagaagaagacggtatgaagttggccaccatggcagttgcaaatggctttgggaacgggaagagtaaagtccacacccgacaacagtgcaggagccgctttgtgaagaaagatggccactgtaatgttcagttcatcaatgtgggtgagaaggggcaacggtacctcgcagacatcttcaccacgtgtgtggacattcgctggcggtggatgctggttatcttctgcctggctttcgtcctgtcatggctgttttttggctgtgtgttttggttgatagctctgctccatggggacctggatgcatccaaagagggcaaagcttgtgtgtccgaggtcaacagcttcacggctgccttcctcttctccattgagacccagacaaccataggctatggtttcagatgtgtcacggatgaatgcccaattgctgttttcatggtggtgttccagtcaatcgtgggctgcatcatcgatgctttcatcattggcgcagtcatggccaagatggcaaagccaaagaagagaaacgagactcttgtcttcagtcacaatgccgtgattgccatgagagacggcaagctgtgtttgatgtggcgagtgggcaatcttcggaaaagccacttggtggaagctcatgttcgagcacagctcctcaaatccagaattacttctgaaggggagtatatccctctggatcaaatagacatcaatgttgggtttgacagtggaatcgatcgtatatttctggtgtccccaatcactatagtccatgaaatagatgaagacagtcctttatatgatttgagtaaacaggacattgacaacgcagactttgaaatcgtggtcatactggaaggcatggtggaagccactgccatgacgacacagtgccgtagctcttatctagcaaatgaaatcctgtggggccaccgctatgagcctgtgctctttgaagagaagcactactacaaagtggactattccaggttccacaaaacttacgaagtccccaacactcccctttgtagtgccagagacttagcagaaaagaaatatatcctctcaaatgcaaattcattttgctatgaaaatgaagttgccctcacaagcaaagaggaagacgacagtgaaaatggagttccagaaagcactagtacggacacgccccctgacatagaccttcacaaccaggcaagtgtacctctagagcccaggcccttacggcgagagtcggagatatgactgactgattccttctctggaatagttactttacaacacggtctgttggtcagaggcccaaaacagttatacagatgacggtactggtcaagatgggtcaagcaagcggccacaagggactgaggcaagcacaatggtttcaaagaaagactgtaagctccatgattagcataaagcactaaccatgtctccatgtgacccgatggcacatagatgttgtagaataagttatgggtttttatgttttgttttgtgtttttccaaaacttgaacttgcaggcaagccttggttgggtatttgatttatccagaatgcttctctttagggaacaaggatgtttttaatggcataacaaaggcaagactctgccttaatttttgaaaagctgctaactacatgaacacaaatgtgtatttttgttgcagtgtagttttccttttgtgtaattttaaagtcagtgttgaattttattgaaagctcatgatgcgcttcaaagtggcaagtatttggctattaactgccaaaacaagagcctgattttttgaggccagtaattcgtttgctagaattgattttttttctctctctctttgttacataagggcattatgtaacactagccgaatggtagcctctgggttgttgtttttttcttttcctccatgatgttaatgggttatctcaaattttaagttaaactacctaaaataaataccaaagataatgcatatttttgcacagtggagcttacacttaaaagaaaacaaagccccatgggctgccttgaaatcaagagacaataactttgaacctcagcaagaccttgaaccgccggttcattttgcaccttattcagaaaatagagcatcatactcaccgagtctagtcagtgtagtgcttttaaaaattttgtcctttcatgtaacttttttattttaagaggaagaagaagaaaggggcacacacacacaataccgacgtctatcctttcctgctaggcagtgctggccaggctcatgtgtagtgtgcgagatggtgatgtactcttatatttttctgggcttttccttttgcacattccaaaattcatttcataagacaagatcttcataggacctccttggcatcctggcattctcaaaactgagccatccagcatgaaagataaatgggtttaaacccttgctgctgaatttattgcctggactgtcaggacatcaccagcccaccttcaccttagggaagatgccacacctggcctccacacttgctcttctgatcagtctgtctggattgagtcctacagtgtcagatagggcggcaaatgccaaagcagggaaacagggaggtgtggacaagccagtttgatgcagcacttcagatcaagtgcttaggaaggagaggaaacttgccttttttatggcagaggatagtaatgaaaatgtctcagtattttagggtcaatgagagccataaaaatataacataatcacaagtaaaggagataatggtctaaaacagctatttcccttttctgtgtgcatacttatgactgaatgtgagctaagcattttctcctgtggagccctagagcaggttactaaggaaggacacattgttttccagaagcctcccctgcctggctgactgccttgctagaaacataattttttttttctcactgaagctcaataatggaactctttttttttttttttttaatttaaagttccctatttgtgaattctgggattactgacttttctttttaattggagtctcaaaatcaactctcttatggtattatatctctgtatgccattaaaaaacagcttgttctagaatcatgtattttgtaaactgatgtttgtgatggtctctggttcttgaacagccatatctgaatgccgtgcctgcaaaactatgacaatttttgctgttttcagccttcagatttgatggcttgggaaactgaggtgttattttcaatgaaacaaagaaagagatgttaagcaagtggttgttttagatccaaatgtaaaggcaggtttgggaaggtgtttaaagagttggaggaattggggattgagttgtaaagaaaacttacagaagaggcaacaatttggttcttgacagtgagaggatattgagggcttcagctgctgctattatgatgttttgcaaaggaaaataatcaaaccaaagagtattcagtgatatgtaaattaaatgaagatacagtggagaatgggggtgaccacaaaagaggctccccctaaacacacagtgctgccacttaaaaagacttgagaaatttgaaagggggtgggtatggggggggcaagaaagagggagggaaatctttcaacttatttctgaaaaagagaaaaaaatataaaatttctggtgcacaggtttgttttttcaagaaaattttgcagaagctatgtttttaaagtgtacattttataaagtttatcagatattttcatatttaaagccaaatgtaaatagaggtctgtaaagaaaaataattgccatagaaagtataatttcagtgcagtaatttctgagagctagtacctatatgctaccggttagcatggttttagcaaatatataccagccttataaggttcgtattgctatgttcttctgttatttatttcagcatggactgttcatttgaaacctttttctagttattagcgttttaacagttacaagctttaaatggcaattttttttttttttttttttttttttttttttttgtcaagagccaagacacaggtaatgcacgacattgattgctgcattttaccttcaaaatatttgtccttattgactgggtctccttaattaatgtacacatgtcattagaatgcagacggaggggactcaccatgaatatctggggttgattcccagatgtgtgttgcttctctattgcaagcagattccctgttggatttacttcggatttattcccttttaaagaatttttgcccatatctggaagggcactatatttttgggaggagccatagattcctggttatcctatttttaaacaaaatgtagacaaagtgaactctattttgattattgagaaaggagtagttttctatccctctaagagtatacttgaatcagacattttaaggatgtcactatggcactgttgtcatttccaaattcctagaaaagtttgttttactttgtttttattctgttaatgcattctttcttctctttacttcctttcttaccagtacactcctatctcaactctgtttatttgatgagttctgtcccgtaaatcatatttcccttacaattaataaatgtcacttcatattttataataaaccactcagtaaaagcaaaagcttgtcctgagaagtagagtgagttctttttcactctgtgtctaataatgttaaggtgggaaaaaaaaaagtgtggcatagctacctgcccatccccaaccctcagcaaagtagaatctcttttctggtaattttgggtttccgctctgggctctggcaagttgaacaatcctagccattgacaatcgtgatagttattattttcccatttgctgtctttttgtatctaaagtcttcctattgtactgcacaaaccatggattgtacatatttttatatattatgtcttattttattatttctaaataaaaaaattaaaaattgaaaa

SEQ ID NO: 515 - DNA, 13744 bp, Homo sapiens
  CACNA1c (LQT8, Brugada; Cav1.2, CACH2, CACN2, TS)
gtctccctctcgctgcctctgcagaaacagctcctgccagagcggcgctcggcgcggcgcggcgggcccggagcggcggcggcggctcttcctgcctccgcgcccaggagttgccggctccctttgacagcagagagccgggcaggggcctcaggaggactcgctgggagtgggcagaggcgcctcggcccctgccggcccaggcgggccccgcgcgccccccgcccctcctctccgcctcttctcgccctgcctctcccgatttattttttcaaatggtgtagccgccggaggtgcggtgctcagttcttggaaggggcccggatgtactgaggatgcgttacagtttcactcgaggaggcagtagtggaaaggagcagtttttggggtttgatgccataatgggaatcaggtaatcgtcggcggggaagaagaaacgctgcagaccacggcttcctcgaatcttgcgcgaaagccgccggcctcggaggagggattaatccagacccgccggggggtgttttcacatttcttcctcttcgtggctgctcctcctattaaaaccatttttggtccatggtcaatgagaatacgaggatgtacattccagaggaaaaccaccaaggttccaactatgggagcccacgccccgcccatgccaacatgaatgccaatgcggcagcggggctggcccctgagcacatccccaccccgggggctgccctgtcgtggcaggcggccatcgacgcagcccggcaggctaagctgatgggcagcgctggcaatgcgaccatctccacagtcagctccacgcagcggaagcggcagcaatatgggaaacccaagaagcagggcagcaccacggccacacgcccgccccgagccctgctctgcctgaccctgaagaaccccatccggagggcctgcatcagcattgtcgaatggaaaccatttgaaataattattttactgactatttttgccaattgtgtggccttagcgatctatattccctttccagaagatgattccaacgccaccaattccaacctggaacgagtggaatatctctttctcataatttttacggtggaagcgtttttaaaagtaatcgcctatggactcctctttcaccccaatgcctacctccgcaacggctggaacctactagattttataattgtggttgtggggctttttagtgcaattttagaacaagcaaccaaagcagatggggcaaacgctctcggagggaaaggggccggatttgatgtgaaggcgctgagggccttccgcgtgctgcgccccctgcggctggtgtccggagtcccaagtctccaggtggtcctgaattccatcatcaaggccatggtccccctgctgcacatcgccctgcttgtgctgtttgtcatcatcatctacgccatcatcggcttggagctcttcatggggaagatgcacaagacctgctacaaccaggagggcatagcagatgttccagcagaagatgacccttccccttgtgcgctggaaacgggccacgggcggcagtgccagaacggcacggtgtgcaagcccggctgggatggtcccaagcacggcatcaccaactttgacaactttgccttcgccatgctcacggtgttccagtgcatcaccatggagggctggacggacgtgctgtactgggtcaatgatgccgtaggaagggactggccctggatctattttgttacactaatcatcatagggtcattttttgtacttaacttggttctcggtgtgcttagcggagagttttccaaagagagggagaaggccaaggcccggggagatttccagaagctgcgggagaagcagcagctagaagaggatctcaaaggctacctggattggatcactcaggccgaagacatcgatcctgagaatgaggacgaaggcatggatgaggagaagccccgaaacatgagcatgcccaccagtgagaccgagtccgtcaacaccgaaaacgtggctggaggtgacatcgagggagaaaactgcggggccaggctggcccaccggatctccaagtcaaagttcagccgctactggcgccggtggaatcggttctgcagaaggaagtgccgcgccgcagtcaagtctaatgtcttctactggctggtgattttcctggtgttcctcaacacgctcaccattgcctctgagcactacaaccagcccaactggctcacagaagtccaagacacggcaaacaaggccctgctggccctgttcacggcagagatgctcctgaagatgtacagcctgggcctgcaggcctacttcgtgtccctcttcaaccgctttgactgcttcgtcgtgtgtggcggcatcctggagaccatcctggtggagaccaagatcatgtccccactgggcatctccgtgctcagatgcgtccggctgctgaggattttcaagatcacgaggtactggaactccttgagcaacctggtggcatccttgctgaactctgtgcgctccatcgcctccctgctccttctcctcttcctcttcatcatcatcttctccctcctggggatgcagctctttggaggaaagttcaactttgatgagatgcagacccggaggagcacattcgataacttcccccagtccctcctcactgtgtttcagatcctgaccggggaggactggaattcggtgatgtatgatgggatcatggcttatggcggcccctcttttccagggatgttagtctgtatttacttcatcatcctcttcatctgtggaaactatatcctactgaatgtgttcttggccattgctgtggacaacctggctgatgctgagagcctcacatctgcccaaaaggaggaggaagaggagaaggagagaaagaagctggccaggactgccagcccagagaagaaacaagagttggtggagaagccggcagtgggggaatccaaggaggagaagattgagctgaaatccatcacggctgacggagagtctccacccgccaccaagatcaacatggatgacctccagcccaatgaaaatgaggataagagcccctaccccaacccagaaactacaggagaagaggatgaggaggagccagagatgcctgtcggccctcgcccacgaccactctctgagcttcaccttaaggaaaaggcagtgcccatgccagaagccagcgcgtttttcatcttcagctctaacaacaggtttcgcctccagtgccaccgcattgtcaatgacacgatcttcaccaacctgatcctcttcttcattctgctcagcagcatttccctggctgctgaggacccggtccagcacacctccttcaggaaccatattctgttttattttgatattgtttttaccaccattttcaccattgaaattgctctgaagatgactgcttatggggctttcttgcacaagggttctttctgccggaactacttcaacatcctggacctgctggtggtcagcgtgtccctcatctcctttggcatccagtccagtgcaatcaatgtcgtgaagatcttgcgagtcctgcgagtactcaggcccctgagggccatcaacagggccaaggggctaaagcatgtggttcagtgtgtgtttgtcgccatccggaccatcgggaacatcgtgattgtcaccaccctgctgcagttcatgtttgcctgcatcggggtccagctcttcaagggaaagctgtacacctgttcagacagttccaagcagacagaggcggaatgcaagggcaactacatcacgtacaaagacggggaggttgaccaccccatcatccaaccccgcagctgggagaacagcaagtttgactttgacaatgttctggcagccatgatggccctcttcaccgtctccaccttcgaagggtggccagagctgctgtaccgctccatcgactcccacacggaagacaagggccccatctacaactaccgtgtggagatctccatcttcttcatcatctacatcatcatcatcgccttcttcatgatgaacatcttcgtgggcttcgtcatcgtcacctttcaggagcagggggagcaggagtacaagaactgtgagctggacaagaaccagcgacagtgcgtggaatacgccctcaaggcccggcccctgcggaggtacatccccaagaaccagcaccagtacaaagtgtggtacgtggtcaactccacctacttcgagtacctgatgttcgtcctcatcctgctcaacaccatctgcctggccatgcagcactacggccagagctgcctgttcaaaatcgccatgaacatcctcaacatgctcttcactggcctcttcaccgtggagatgatcctgaagctcattgccttcaaacccaagcactatttctgtgatgcatggaatacatttgacgccttgattgttgtgggtagcattgttgatatagcaatcaccgaggtaaacccagctgaacatacccaatgctctccctctatgaacgcagaggaaaactcccgcatctccatcaccttcttccgcctgttccgggtcatgcgtctggtgaagctgctgagccgtggggagggcatccggacgctgctgtggaccttcatcaagtccttccaggccctgccctatgtggccctcctgatcgtgatgctgttcttcatctacgcggtgatcgggatgcaggtgtttgggaaaattgccctgaatgataccacagagatcaaccggaacaacaactttcagaccttcccccaggccgtgctgctcctcttcaggtgtgccaccggggaggcctggcaggacatcatgctggcctgcatgccaggcaagaagtgtgccccagagtccgagcccagcaacagcacggagggtgaaacaccctgtggtagcagctttgctgtcttctacttcatcagcttctacatgctctgtgccttcctgatcatcaacctctttgtagctgtcatcatggacaactttgactacctgacaagggactggtccatccttggtccccaccacctggatgagtttaaaagaatctgggcagagtatgaccctgaagccaagggtcgtatcaaacacctggatgtggtgaccctcctccggcggattcagccgccactaggttttgggaagctgtgccctcaccgcgtggcttgcaaacgcctggtctccatgaacatgcctctgaacagcgacgggacagtcatgttcaatgccaccctgtttgccctggtcaggacggccctgaggatcaaaacagaagggaacctagaacaagccaatgaggagctgcgggcgatcatcaagaagatctggaagcggaccagcatgaagctgctggaccaggtggtgccccctgcaggtgatgatgaggtcaccgttggcaagttctacgccacgttcctgatccaggagtacttccggaagttcaagaagcgcaaagagcagggccttgtgggcaagccctcccagaggaacgcgctgtctctgcaggctggcttgcgcacactgcatgacatcgggcctgagatccgacgggccatctctggagatctcaccgctgaggaggagctggacaaggccatgaaggaggctgtgtccgctgcttctgaagatgacatcttcaggagggccggtggcctgttcggcaaccacgtcagctactaccaaagcgacggccggagcgccttcccccagaccttcaccactcagcgcccgctgcacatcaacaaggcgggcagcagccagggcgacactgagtcgccatcccacgagaagctggtggactccaccttcaccccgagcagctactcgtccaccggctccaacgccaacatcaacaacgccaacaacaccgccctgggtcgcctccctcgccccgccggctaccccagcacggtcagcactgtggagggccacgggccccccttgtcccctgccatccgggtgcaggaggtggcgtggaagctcagctccaacaggtgccactcccgggagagccaggcagccatggcgggtcaggaggagacgtctcaggatgagacctatgaagtgaagatgaaccatgacacggaggcctgcagtgagcccagcctgctctccacagagatgctctcctaccaggatgacgaaaatcggcaactgacgctcccagaggaggacaagagggacatccggcaatctccgaagaggggtttcctccgctctgcctcactaggtcgaagggcctccttccacctggaatgtctgaagcgacagaaggaccgagggggagacatctctcagaagacagtcctgcccttgcatctggttcatcatcaggcattggcagtggcaggcctgagccccctcctccagagaagccattcccctgcctcattccctaggccttttgccaccccaccagccacacctggcagccgaggctggcccccacagcccgtccccaccctgcggcttgagggggtcgagtccagtgagaaactcaacagcagcttcccatccatccactgcggctcctgggctgagaccacccccggtggcgggggcagcagcgccgcccggagagtccggcccgtctccctcatggtgcccagccaggctggggccccagggaggcagttccacggcagtgccagcagcctggtggaagcggtcttgatttcagaaggactggggcagtttgctcaagatcccaagttcatcgaggtcaccacccaggagctggccgacgcctgcgacatgaccatagaggagatggagagcgcggccgacaacatcctcagcgggggcgccccacagagccccaatggcgccctcttaccctttgtgaactgcagggacgcggggcaggaccgagccgggggcgaagaggacgcgggctgtgtgcgcgcgcggggtcgaccgagtgaggaggagctccaggacagcagggtctacgtcagcagcctgtagtgggcgctgccagatgcgggcttttttttatttgtttcaatgttcctaatgggttcgtttcagaagtgcctcactgttctcgtgacctggagttaaccggaacagcgtcttcattcatttctgttgggaccagacgcggagcctgggtgcgcgagccgccctccgggaggaaggcgcccggctgcgtctgcagaggcggggagaggaggcggcgagggtcccggggcgcgaggaaggcgcctgccctctcccagctcgcaggccccgggcccggccgcgcctccgcggggagagcaccccggcttcccgcgcgccctcaccaaaaggaccctacagcaaacgggtgtctttcgactctgcttgtagaaaccatttgcacatattctgtacgagcctcgctgtctccctagagccagggccctgcggatttggagaagggagcggggcaggacttccaggaggaccccaacccggcccggagagggaggaggaggcctccaggggcgcggagctctggggatgggcgtcgggccggcagtggtgcggctcactccgtccctgcccacctgcgacgggatcccccgaccggcacgggccacgccgagctcccggccagccgccggcccgcaggcagcgcgagggaggagctgcgccgccggctccgcccaaccaggtggtgctgagcttccgctgagcgctcttttgttttgtggtttgacacttttcttgacagcatgttgcagtttcttttcggttttggttttttttaaatgttttattttgctttcccagcgggaggggaggaagaagagtgtttacaaagtcctgtagccccctcacctttctgttttcacttttgccaatgtacatcgggtttggttttcttgtattatttaaacggttgtggtttcctttttccacggaggttcaatagaagccgctgcaggagagttttaccaaccattgtgtatgcccaataatttgttatcatttccttaggtagtaacctatttttgttctggtttggttcggttatctaatggaaaggtaactggcaatgcacttgatgtggtcttgcacatgtgggtgatagagttgggttcctttttatgctgggtgtacaggtgggtttgggagagaggagcatgcgcgagagagtctccgagtgtgtgcgacgcgtgtgtgtgtggtgggttgtctgtgtgcatatgtcctgcccgtgtatatgcacccacaccatgtgcccgtgcacaccagtgactacgcagtcccccctttctggtttagctgtgggaagatctgaatctggggccgtttgaaagcaaaaacaaaccactgtctctgcttctgaaacgggaatcagtaactctttgcattttctgtcccacaagatatgcaaaaacaatgcaataatattcatttaaaaatacaattgtgagttgtgttggcattaaaactgtattttaaaaaaagacagaaatttaagggaaaaacacaagaaggcattttgcttcaatatattccgtgtaatgttttattgcattgataatgtttctgttgaagaaaccgttatacttgaattcaggtcagtttcagtatttttcaaatatttttttaaaactgaattgcaattgtgccaagcgaatataatgaattgaattaagttggttttcggattcacttcttgtatattttgctgcatgtaaagtaaatcattttgtatttggagtgtgacaagctttacctttgaactcaagtgcttttctatatgtggttgggggaaagggaacaagttttctttagtttgcacaatgagcaaaggtatcaccagtgtagtcattattctgctctccacaaacaggtttggacattactgttttgcatatcttgtgtttgcttacatttccctcaatttttccaaaatcgtttgctgggtatgtttgtaccgcctcttgctgtgagagaccaggacctattttattccagtcttcactctgtccactctgctctggtcatctgatttggtacttctccaagaacagcccttcactgtgaggtgcagggaggcgttctgatgagccctcagtcactgggccgtcatccgcatcccccatggaagaggtagctggctttcccttcccttccaccacacggaattttctctttggcttccttaggaaagtgtacactaaccgggaggataaaattaaagtcaggctgcttggagggaggggcatcctcacttccggattcttgttgctctacccaacaaggacagcaggggctcgagaaaggaactggtgaaaccctgatccatctgaaagtcaactctgcgtgctcctttctccatcccttcctcactctggagcagcctttccttcaggcttgccctaatgtttgggctgccggggagggggccaggacaagggaagaggcatccggagctcacagtgggggtgggaacagatttttgtgggggcatctctaatgctcacttatatctccctagaacatcactcttttggtgctgtgtccttcaaatgtatgtcaacagtggtggctgaaaagggactgctttggggaaaacaggacccaaccattcacccagaattgacccattaaatctcttccagtcctagtgttccctgagcccctcttggcacatatataagtaagctagaaattacaataagggacagtccattcctctatgacagcttgctggactgattcatgacaaagtggagaaatgtactcaatactccccggttaacacagtctagaaacagagtttctttatggatatccacacccaagtcatccaaactttcttgattccttttcactgccatcaaggtcctctagaaattgagtttaggtatcatcctttgaaaagttcccaagatttctaccaggaggtacacacaggcgttccctgtctagggcaggaggactatcctagcttgaccttctgatccactagaataagactggcgtatgatgcctgtcatcagaacagactggcacaagtagtgacatcaatgaaccacagcacaatcttccaagtgatgtctactctccacctaaaatggaattttccccatgaccttgtaaaacataattgtcacatcttccatacccctcctgacagcccccaagtgtcaggagaaaacagtcaggggctaagggcccaagggacttgaagaaacaacagtttaaggtctgcagtttggtcaacttaattcttgtcctccgaccagccctgcctctttcatttccagaccttggagaatttttcccagctttgattcagaaggtactagttataacccctttccttcttcttaatccaataggcctcactctcactgggaaatccactcaaaggaacaaggcaatgtctctcattctatttcccagttccaaattccaggtgcttgtctggagtgaagctacccgttactttctcccagcttttctccacccagcatgtctcctgcccatgcagctgaagacagtggggcaacctcaggagaagcagacctttccatgcccaagttcatctcctgagcaacagtgacacctagaaaatgaggactttggaagtcacccaaaagatggtggctactttatggagtcctgaagatacacagccaccactcctaaaggcaaagaaagaaaacacgaatgtaggtcagggatagagtggaaccctggtcatcggggtttttagcctcatcgtgggaaaggtggtaaaggaggatgatggcatctccatccctagaggccaagaattgaaatatcattgtcaaggattagaaacaattcagcaaagaggccacaaaaagggcctgctgactcccagaagacctctttaaaccccaggggaggcaaatacttgctgatggagtctgggccgtttccatattttaaagaagacctgcctctggggcaaatgtcagcacagagaggactgggaggagaatggaggcaagaaaagggcatattttgactccctctgtgcctcttcccagttcatggaaggatgtgttcagcttacccacccacagtgaccagtgtggtggagccgctgacatctcaaggatctatttgggaaggtgagaagagtactcattccatctgggggtgttgttccagccacatcagcctacctggtgggatgtgggggtgtctgccaccctgtcccccctctgctgatgtccctcccctcaggctgtccaggtgccacctgacacaggctgctgtgcaaagacaggcggggaagcccaaacctcactcccagggaggccctcagccgccagagtccaggttctccagaggctacgatttgaggaggttgagggggaagacaggagggaaagaaaagtcctacaactgtcaggaatggggcacctttccctgtccctaagcaaagctccctcttcccactgccctccccagccccagctccctgtcctccccaacacctagtgagaaagacggtgcgtggaagggagtcccatgggcagatgcttacacgacctctttgtgaagcctcttctgggtttaacttcattcatcaatttattcttatgtcaaagcaatgaaacttttctttctggagccagataccaatacaacaggtgaacgggtttctgccacatctctacattgacgggggatgcttgaacaacccccctcactacacagacacacaccgttaaggcacaagggctggggttgagctctagatgagggactttcctgctcctgcaagggtgagcactgtatacacagacaaggagggtgcagtagagtgactcccttggatggaagtagtaccatcagaacctactattattatgacataaattctatttacatacattgagagaatactacaatcaacactttttcctgggatgactttaagaggtttgagccacagcacctgaagtggcaaagatccatggtctttgtagggtattagagaactcttccagtcacctctgaaagcactctagatcttgcagctgagtggatgaagtgtaacaaatctgttgcacgctgagaggagtcagaattagcatttttcatgaaagttccccacgtctctactaagaatgaggaagaaaagactaagactaggtaattacacagaggcttgaaatgttacatcaccagagccaagtcctctcccttcagatcagttactggctgctacacagggacacccccaccttttcagggcatcccatgcactccacttctcaggatctaaggaatttgactttgtagggatcccagaaagggcactgtgccacttcccctggtgtgaatcagacatacattgtacattcatttctaaaattcactcatgcacctcaaaccaaggtcattatccaaaaaaaaaaaaaaaaagctctgggtggaagagtttgtaagttttaagagagggtcatttctatgtgaggaaatgcagaaatggacagaatgattcttattcactgtttgggtctggagaattcccattgtggaaatcttagagatctcaagtttattaccaagggaataaggaaaaaaaggtgagcaggcaccaggccaagcagtggctcccttgccaaggaacctgaggctgcaggtttcagggacccccttgaagaaacctctcctggccattggccaggagaaaagagaagtctctcctgtagagtcacaagagaagcaaaagagggtgggtcactgggtcctggacatagcccccaaccccaagacttcccaatatggagaaactacaccaatgtttaaaaggggaaaaggaaagaacttgtacatcaagggaagatgatttgtaaacacacagtcctgtgcagaaagatccccttcaggaggtgtctccagcatcccaaagctgtgcgcaccttctcttttcctgcctcaggccacctatgcatccagctgcagcccatacccacacctgaaatccatctcttgaatcccagccaggttatataccaccccattgccatgtcctgtcctggccagaatgcatgctgttcccccaagcctcgtgggagtgaggccatgggaaacagagatgagcatgtctggacaagtctgtgatggtagtggatgagaataacccatggcaaaacacgcacattcattaagaaatagggcgacagattccccgttggtgaagcactgaaaggtctattactctcataatattgctgttttattttaatccaccagagctaccatgcaaaactttcctcctgtgaaacgctccagataaagctcctctaatctccccttccctcatgtcctccagctcaaacccaccttcatcccccaaaccaatctgtatcatgcctgttatcagagaggcacagaaagatgggcagtgcctccgttgtcaccattccccacacccctacacacccccacaccctcccctccaggctccacgacttcacagtcttactgttgtaaatatcattgtacagtttgtaatcctcaaataatcccattgtcagaggcctcgcctgatgggccttctcaccctcgagaaaggccagggaatctagaaggggcaacccttcaaggagagcttcagggtcatctctgtgtgagacactattgtatattcctgtaagattgcatttttatctaaggaatgatgttatttaaaaaacaaacaaaaaacacaaaaaataagaattgcaaataaatttcttaacaatgtcta

SEQ ID NO: 516 - DNA, 4085 bp, Homo sapiens
  SCN4B (LQT10)
gctctctgcccgctaactttcccgagccccgaccggcggcgcagagctccggggtagctttgtggccgaacgccgacctcgggcggagagcgcggctgtgcccagtatcccatccccgcgacccccgcgcgctccggagagaacaggactatgcccggggctggggacggaggcaaagccccggcgagatggctgggcactgggcttttggtggaagaagtggacaacacagtgacactcatcatcctggctgtcgtgggcggggtcatcgggctcctcatcctcatcctgctgatcaagaaactcatcatcttcatcctgaagaagactcgggagaagaagaaggagtgtctcgtgagctcctcggggaatgacaacacggagaacggcttgcctggctccaaggcagaggagaaaccaccttcaaaagtgtgagccctgcttcgggctgagcagctgcagggagccccctttctgatgatgaaactgatgcttgagccccgaccgtagaacccacgtgcctgagacatctgctgcttggctcaaactgtagtctttccgggcacaagaaaccagagtcctgcccagcctgcccatccccttcccagtcagggctccccagggacaagggatggccaggggagggggtctgtggaagattcaggagaaagaaaggagaggctagggtggtgtggaggggctggtcccctgacacctgggcagatggggtctccttcagtctccctaccctgcacaagcagggccttgattttcctccaggcttctcttcacaagagactgggaggatccgtaagggatgtcctaagagctgcaccctggagatggggtgtaggaagaagtggcttcctttggaggtgggagtgggctggaggcctctggagaagacctggggtgggggctgatgggggcaggcccacagtgagagactgcctctgcttcataggataccagatcccccacagtcttccaagtaggaaacttcctttcccctgccccgggaccctatctgcctatcccctcccctgctcagagtttttaagccctctcaaccagggctggccaccctggtcttgagggttcctggccacctagcctgctcctctgctctctgggttactgaggggctcaggaaggggcccctcgagccttcctggagtacccgagtgctccctatgcctttccaagcatttctacttggggaattgggccacagaggtagtgagccagtgtcctgggcctctgggatgcccgccccattgctgccaatgctggcagcccctcccctggcatggcaggaccatcgccactctgggcactcctgagcccagctctcccctgcttctccccctcctacctgagaggctgcaccctccaacctcccattggctcgctcccccccccccaccgtgccctccatcacgccctgcccccagggtggttcatttcccagccctgggtcaagggcctgccttcgcctcagggactctcttcctttggatgagggggtccttgggtttcccagctgcttcctgctcagctgggccaccccctcccaccctggggttggggaggagcagggagtgggtgcccacagttttcctttgcttctcccagagctggtttgcacagcccttgtgtgtggggctagaatgtgccttagtcctgaatcctagcccttacccccatcctctctagacggtatgtcctgacataacagcagagtctggtgtggtgctggtgagggttcgccagccctcccctccccagggtcatagagggggccatgaggctggaattggccagtgactgaatcttggagatgtcggccaggtgctcccattggggtttctagcctgccctagggggaggtggtgatgttgggagtgggatctcctgagtccttgttgggcagaattggtgaggccagggatggcagggaaaagtggtaacaagcctctctgcccatctacttccaatccctctctcccttactgattttttgatgccctgtcttctgggcccctaggagggatgagagaggagtagccccctttttcagagagtttggggtctacctcagagctctccctgtcaaaaagcagctgcaagcctcgcaagggtggagtggggggagactgaggaccagtagtacctgcagggtgcccgtggctgtggccagtgtcccttagccaacctgctgggctcaccagttccccgtctgatctgcctgtgcgcctcccattcttctctacccagaacctgtcatgggctggggctcagattttcctggctttgggagcagacagaccagagccaccagccattcagaaaacttcttatagctaccttcatgcaaaactgttttcttcttccttctcaatggtgacatttgaagaggcagagcaccttggggctcctccttctgtcttaagagaaagccaaggcacgtagagtagggagaagaagggcaccatcctctctttcctccccagggtctactgctgatttctagatggatcatgcagcttctctcagctcagctctttccatctaccaaatgggtgtaataatacttacctacctcacaggactgttgtgaggcttggcaagttttgtctaaaaacatctttttggcttggaaagggatctgggaagccaggtattaattgcagggatagttccaagtctgtcctgtcttcatctctgtgtcccatctctacaacccacatacagacacacacactctctctctctttctttccatcccaccccccttggaattatttagtctttgcaatattagaaaccttgactctgatgcttaaagcttcttgtccatggcttttgtttgatggttttcaatagaggtgactgagattgtagggggggcatttttggttgcccccatgcgtgggggcactactaagaatgctaaacttagtccccacaacaaagaatcatcctgtcccatgtcaacattatacccatggagaaacactggcatggatttgcactaggatgtatatgggcaaagctatcttccccaagtggaacctcagtgcatgcaaatctctgatggtggcttccagggcttgtgggctagagagagccacttacaaagtcgatcttgagagacctggccacatgcagctgggctgagtgatgtcagcgagactaaagacaaagttctgagctcctcatcaactacaaaatatgaaatcagcattccaggttctgggcttctccccatgtcgtaattgaacagaaggcagcccgaataaacccctgatgttagagaggcctggggagagcagccgatggggctcagactacatatggcaggccgatcagagctcttgtggagcgagggcttgagagcatgcttgtgagatggcaggaggtggggtgtgcttgtgtggagtgtgcgtgtgcaggcagtgtgggtgcatggcagcgtaactgtggagtggatgggctctgcatgtaaggggtgatgcatgatgggcagatgctggacatttgaggagccgtctttcttggcctgagctatgcctgttgaggcatctggagactgagaaagaatcaaaggcagagaagaccagccgtgctcctgcattccgtcactccatgacttcatctcagtgtcacagacagctgccatcagagggctggcagtagggagttccaggagcggggacttctcgggaaaatcctataacttgctttactttactttgtcccaggttggagtccctaccctcccacctcccacctgatatgcagtgcttttgactatcttatgcatggtttattcctctggcttggatgacaacaatacccatagtcaattttcctatgtaactatagatcaaatgatgcaacaacaggccttgggaggcctcaggtgtgcgagtgcctctgggaggcgcagatgcccacacagccagcactgacttgtgttcgagcacagaacggatataatcagtctggcctctacaacaagttttgcattgtagaattgtatttagctttgccttggatgaaataaaaattatgtttaataa

SEQ ID NO: 517 - DNA, 3493 bp, Homo sapiens; identical to SEQ ID NO: 474
  SERCA (CPVT; APT2A1)

SEQ ID NO: 518 - DNA, 1441 bp, Homo sapiens
  KCNQ2 (short QT; Kv7.2, ENB1, BFNC, KCNA11, HNSPC)
aggcgccgaggtgcgcgcggagcgaggtggccgcagcgtctccgcgcgcggcccaagcccggcaggagtgcggaaccgccgcctcggccatgcggctcccggccggggggcctgggctggggcccgcgccgccccccgcgctccgcccccgctgagcctgagcccgacccggggcgcctcccgccaggcaccatggtgcagaagtcgcgcaacggcggcgtataccccggcccgagcggggagaagaagctgaaggtgggcttcgtggggctggaccccggcgcgcccgactccacccgggacggggcgctgctgatcgccggctccgaggcccccaagcgcggcagcatcctcagcaaacctcgcgcgggcggcgcgggcgccgggaagccccccaagcgcaacgccttctaccgcaagctgcagaatttcctctacaacgtgctggagcggccgcgcggctgggcgttcatctaccacgcctacgtgttcctcctggttttctcctgcctcgtgctgtctgtgttttccaccatcaaggagtatgagaagagctcggagggggccctctacatcctggaaatcgtgactatcgtggtgtttggcgtggagtacttcgtgcggatctgggccgcaggctgctgctgccggtaccgtggctggagggggcggctcaagtttgcccggaaaccgttctgtgtgattgacatcatggtgctcatcgcctccattgcggtgctggccgccggctcccagggcaacgtctttgccacatctgcgctccggagcctgcgcttcctgcagattctgcggatgatccgcatggaccggcggggaggcacctggaagctgctgggctctgtggtctatgcccacagcaaggagctggtcactgcctggtacatcggcttcctttgtctcatcctggcctcgttcctggtgtacttggcagagaagggggagaacgaccactttgacacctacgcggatgcactctggtggggcctgatcacgctgaccaccattggctacggggacaagtacccccagacctggaacggcaggctccttgcggcaaccttcaccctcatcggtgtctccttcttcgcgctgcctgcaggcatcttggggtctgggtttgccctgaaggttcaggagcagcacaggcagaagcactttgagaagaggcggaacccggcagcaggcctgatccagtcggcctggagattctacgccaccaacctctcgcgcacagacctgcactccacgtggcagtactacgagcgaacggtcaccgtgcccatgtacaggtaccgccgccgggcacctgccaccaagcaactgtttcattttttattttccatttgttcttaaaccccactttttgttgttcattattttgattgattttttttctttaaaatgtatttttcacaaagga

SEQ ID NO: 519 - DNA, 1666 bp, Homo sapiens
  SCN1B (Brugada)
agtgcgcaggagaccgcggtccgcgcccgagcgcgcccgagccggagcgggaccggggtcggtgcacctagcggatgtgcccggctgcgcgcgccagcgcagcagcccgagcagcggccgccgcccgcgcggcggggatgcccggacgccgggccccggggctgggcccccggcggtaaccggagcgggggggccgcgccccccctcctcccccctcgccggtcccagagccgcagctgctgcgcccgcgcgctcccggggacattctaaccgccgccaggtcccgccgcctctcgccccgctattaataccggcggcccgggaggggggcgcagcacgcgccgcgcagccatggggaggctgctggccttagtggtcggcgcggcactggtgtcctcagcctgcgggggctgcgtggaggtggactcggagaccgaggccgtgtatgggatgaccttcaaaattctttgcatctcctgcaagcgccgcagcgagaccaacgctgagaccttcaccgagtggaccttccgccagaagggcactgaggagtttgtcaagatcctgcgctatgagaatgaggtgttgcagctggaggaggatgagcgcttcgagggccgcgtggtgtggaatggcagccggggcaccaaagacctgcaggatctgtctatcttcatcaccaatgtcacctacaaccactcgggcgactacgagtgccacgtctaccgcctgctcttcttcgaaaactacgagcacaacaccagcgtcgtcaagaagatccacattgaggtagtggacaaagccaacagagacatggcatccatcgtgtctgagatcatgatgtatgtgctcattgtggtgttgaccatatggctcgtggcagagatgatttactgctacaagaagatcgctgccgccacggagactgctgcacaggagaatgcctcggaatacctggccatcacctctgaaagcaaagagaactgcacgggcgtccaggtggccgaatagccctggccctgggccccgcctcaaggaagagccagccgtaatggggactctccaggcaccgcctgcccccagcgtgggggtggccactcctgggccccagaaagcctcagagtcctgccgacggagccactggggtgggagggggcagggggcttggctcgcacccccactttcgcctcctccagctcctgccccgccggccgcgcaccgccatgcatgatgggtaaagcaatactgccgctgcccccaccctgcttctgctgcctgtttggggaggggggcggtgaggtgggggcagcggccccgcacccctcctccttgctgatttgcacacattggccgcttcagacacgcacttctggggccagcccctccccgcctcctccctgcctggcggcaggggtcgcgatgatgggctggagcagtttggggcagggggttctgggacccactccgactccccctccccggcatcatttcccctcccgcttcctccggctggacctggggtcccccctccctgtaatgcactcctgccccggcccaacctcgccctctctcaccagccttgaactgtggccacctagaaaggggcccattcagcctcgtctctttacagaagtagttttgttcatgaaataaagactcttggacttga

SEQ ID NO: 520 - DNA, 3064 bp, Homo sapiens
  KCNE3 (Brugada; MiRP2, HOKPP)
agagccagagagcgcgctgggcggtgctgggcacccgcggagtggaacggggctggtggaatgcacagggtcgcagcgcttgggccaccctcggtcagagggcgccgtgtccagcgagcaaacgggcgccccggagccttgctgagaggcagctctgggctttcccagctccgaagtcaatactgagatcccagatgtgtccagagacatcctgaagaggctcgggggtggaggagccttagtgtgtccacaaagggactcctgaaactgactgagagccagtggatttgccagcagtctgagcttctaccgagtcttcccccacctcaatccctgttgctatggagactaccaatggaacggagacctggtatgagagcctgcatgccgtgctgaaggctctaaatgccactcttcacagcaatttgctctgccggccagggccagggctggggccagacaaccagactgaagagaggcgggccagcctacctggccgtgatgacaactcctacatgtacattctctttgtcatgtttctatttgctgtaactgtgggcagcctcatcctgggatacacccgctcccgcaaagtggacaagcgtagtgacccctatcatgtgtatatcaagaaccgtgtgtctatgatctaacacgagagggctgggacggtggaagaccaagacacctggggattgcgtctggggcctccagaactctgctgtggactgcatcaggtctcagtgtccctatctgtaagatcaacaagaaacacggttaagggaggtcgtcactggggtgggagaagaggggctggtagaccgaagccttgtgcataaggattttttcccaggaaaagatagactttataaacagtgggagcccatgaacaaacatataaaagtagcaacagataatgaccaataactggttcagtggctggagtattaggggcctggggattggagaacggagaagaagttgtagcagagggaaatgagacaggaagatgctctggggacacattttttatgtgttatcttcagccatgagaagcagtgatgactatcccatatcacagatatgatttaccaccaccaccctgcccccgctcccgtgaagaaagcagggcaagtgctgtgctgcccatttgggcctgcatagtgccatgattggaacccaggaactctggtctccttgcctagtgcttttcaaaactctgtgctacacaggagtggatccaggcctgaaggtcatacaattctggggactctctttaagaaaaagaattctaaaatatcttacttttgcaaacattatgaaaatatactgccacattaatatgttgctagggcccctgctaggaccttaagaaggagctcatgtgagtcaggaccctgaatgttaggcctcgttagctctatggttcatatgcttcttgaaccaagtcacagggcacttcccagccacattgccaggcaacaggactaaactacctccaaagcaagcagtcttttcagttttgactgagtgatgtgagaaacttcttttcttttcttttctttttttttttttgagacagtctccctatgtcacccaggctgtggtgcagcaacccaatcttggctcactgcaacccccacctcccgggttcaagcaattatcctgcctcagccacctgagtagctgggattacaggttcctgtcaccacacccagttaatttatatatatatatatatatatatatttaagtagagacagggtttcacatgttgcccaggctggtctcgaactcctgtcctcaagttatctgcccattttggtctcccaaagtgctgggattacaagtgtaagccaccacgactatctgagagaagttttctgatgtcatgttgaatctgcttctaaaagactgatactgccaaggtgggcggatcacctgaggtcaggagttcgagaccagcctggccaacatggtgaaaccccatctactaaaaaaatacaaaaattagccagacctggtggcgggtgcccgtattcccagctacttgggaggctgaggcaggagaattgtttgaacccgggaggtggaggttgcagtaagccaagatcacgccactgcactccagcctgggtgacagagcaaggctctgtctcaaaaaaaaacaaaaacaaaaacaaaaaagactgatatcgcacctaaattattattatattaaaagaagcagagtatgagagacaggtacatggtccagtaggaagagaagcagccctgattctaccacttaaggtgatgtatgatcttaggctggacacttctctccctcatccgttttcctcttcaacataatgaaatagacttgaaagtctctaaggctctatcagttctgacattctaggcttcatatacattaagttgagccatatgtaatcactgtgtttgtaggttagaaacagctgagtatcgtagtttcatatatggttccagctaatacatgcaatgtggctggtgaacacttctgaattcagaaactatcccagatctcagctagaaccatccactgttctgtttgtccagtttcaacttaagggatctccatgcggtccctggaagtacccattgaaacatgcgtatttgtgtatagcagaactctgaaataatattctgacagcagttatctctgaggaattgggttataggtgattttccctttccgcatgataaatttatgtaatatttgactgacttgaccgtaagtatgttacttgtataataaaaggaaaaaaggtacttctattttgaaaaaataaaaataaaagcctttgggttcttgaatggaggatcatggaacacatttgctgccatatgcagttatgttgatgctctgcaaacctgtgctgagccctgttgctcaagcccttcctcatctcttcttgagggagaaggtggagacttccttaaggagatgtgacatatgggaagacaacagattcagaaatttacgtggataggactttagacaccacccagcccaaacttccaaataaaatatggaacgcaa

SEQ ID NO: 521 - DNA, 20623 bp, Homo sapiens
  Nebulin (NEB) (Nemaline myopathy)
tggcttttgcctggggttctcaggaggggagagttgggagaggctttgctgctgaggaaatttatttggtagattgaaggtttgaacgagagctacagaaacgaaagaaaaagtctgtataagccaatggtgttcgggaagaaaataaccccattgccttgagtttgtaggtgccactactactctggaaaaatggcagatgacgaagactatgaggaggtggtggagtactacacagaagaagtggtttacgaagaggtgccgggagagacaataacaaaaatttatgagactacgacaacaaggacatctgactatgagcaatcagaaacttccaaaccagctctggcacagccagcactggcacagccagcatcagcaaagccggtggagaggaggaaggtcatccggaagaaagtggatccttcaaagttcatgaccccctacattgcacacagtcagaaaatgcaggatctttttagcccaaataaatacaaggagaagtttgagaaaacaaaaggacagccatacgccagcacaacagatactccagaacttcgcagaatcaaaaaagtacaagatcaactcagtgaggttaagtatcgaatggatggtgatgttgctaagactatatgtcacgtagatgaaaaagcaaaggatattgaacatgcaaagaaagtgtcgcagcaagtcagtaaggttttatacaagcagaactgggaagacaccaaggataagtacctgcttcctcctgatgcccctgaacttgtccaggccgttaagaacaccgccatgttcagcaagaaactgtacactgaagactgggaagcagacaaaagtttgttttacccctataatgatagcccggaactgaggagagttgcccaggcccagaaagctctcagtgatgttgcctacaaaaaaggtctcgctgaacagcaagctcaattcacgcctctggctgatcctccagatatagaatttgccaagaaagtaaccaatcaagtgagcaagcaaaaatacaaagaagactatgaaaataaaatcaaaggcaaatggagtgagacaccttgctttgaagttgcaaatgccagaatgaatgctgataacattagcacaaggaaataccaggaagattttgaaaacatgaaagaccagatctacttcatgcagaccgaaacaccagagtataaaatgaataaaaaagctggtgtggcagctagcaaggtaaaatacaaagaagactatgaaaagaataaaggaaaagcagattataatgtgcttcctgcttcagagaacccacagcttaggcagctgaaggcagcaggagatgccctaagtgacaaactatacaaggaaaactatgaaaagacaaaagcaaagagcataaattactgcgagacccccaaattcaagctcgatactgttctgcagaacttcagtagtgataaaaaatataaagattcctacttaaaagatattttgggacattatgtaggcagcttcgaggatccataccattcacactgcatgaaagtcacagctcaaaacagtgataaaaactacaaagcagaatacgaagaagacagaggcaaaggcttcttccctcagaccataactcaagaatatgaagcaattaagaaactagatcagtgtaaagaccacacctacaaagtccatccagataagacaaaattcacccaagttacagactctcctgttctgctacaagcccaagtcaattccaaacaactgagtgacttaaattacaaagcaaaacatgaaagtgaaaagttcaagtgccatatcccccctgatactcctgcttttatccagcacaaagtcaatgcctataacttgagtgataatctttataagcaagactgggagaagagcaaagccaaaaagtttgacattaaagtggatgccattcccctgctggcagccaaagccaacaccaagaacaccagcgatgtgatgtacaagaaagactatgaaaaaaacaaagggaaaatgattggagtcctcagcattaatgacgatcccaagatgctgcactccttgaaggtggccaaaaaccagagtgatagattatacaaggaaaactatgagaagacaaaggcaaagagtatgaattactgtgagaccccaaaatatcaacttgatactcagctgaagaacttcagtgaggctagatataaagacttatatgtaaaggatgttttgggacattatgtaggcagcatggaggacccatatcacacacactgcatgaaagttgcagctcaaaacagtgataaaagttacaaagcagaatatgaagaagataaaggaaaatgctatttccctcagacaataacacaagaatatgaagcaatcaagaagctggaccagtgtaaagatcatacctacaaagttcatccagataagaccaaattcacggcagtcactgattctcctgtactgttgcaagcccagctcaacacgaaacagcttagtgatctgaattacaaagcaaaacatgaaggtgagaagttcaagtgccatataccagcagatgctccacagtttatccaacacagagtcaatgcctataatctgagtgataatgtttataagcaagactgggagaagagcaaagccaagaagtttgacattaaagtggacgccattcccctgttggcagccaaagccaacaccaagaacaccagcgatgtgatgtacaagaaagactatgaaaagagcaaagggaaaatgattggagccctcagcattaatgacgatccaaagatgctgcactccttgaagacagccaaaaaccagagtgatcgcgaatatcgaaaagattatgaaaagtcaaaaactatctacacggcacctcttgatatgctccaagtcactcaagctaagaaatctcaggcaattgccagcgacgttgattataagcacatcttacacagttacagctacccccctgatagcatcaatgtggaccttgccaagaaggcatatgcgctgcagagcgatgttgaatacaaagctgactacaatagctggatgaaaggttgtggctgggtgccttttgggtccttagaaatggaaaaggcaaagcgagcttcagacatcctcaatgagaaaaaatatcgccaacatccagacaccctcaagtttacctcgattgaagatgctccaattacagtacagtctaaaattaaccaggcccagaggagtgatatcgcttacaaagccaaaggagaggaaattattcacaaatacaacctgccaccagacctgccccagttcatccaggctaaagttaatgcctacaatatcagtgagaatatgtacaaagcagacttgaaagacttgagcaagaagggatatgacctgagaactgatgcgattcccatcagagctgccaaagctgccaggcaggcggcgagtgacgttcagtacaaaaaagactatgaaaaggctaaagggaaaatggttggcttccaaagtcttcaagatgaccctaaactggttcattatatgaacgtggccaagatacaatcagatcgggagtataaaaaagactatgagaagacaaagtccaaatacaacacgccccatgatatgttcaatgtcgtggcggctaagaaagcccaggatgtggtcagcaatgtcaactataagcattctctccatcattacacctacttgcctgacgccatggacctggagctgtctaagaacatgatgcagatacagagtgataacgtctacaaggaagactacaacaactggatgaaaggcattggctggattcctattggcagtctcgacgtcgaaaaagttaaaaaggccggtgatgctctgaatgaaaagaagtacaggcaacatccagacaccctcaaatttaccagcattgtggactccccagttatggtccaggcaaaacagaacacgaagcaagtcagtgatatcttatacaaggctaaaggagaagatgtgaaacataaatacaccatgagtcctgatcttcctcagtttctccaggccaagtgcaatgcttacaatataagtgacgtctgttataaacgggattggtatgacttaatagccaagggcaacaatgtgctgggcgatgctattcccatcactgcagccaaggcatcgagaaacattgccagtgattataaatacaaggaagcttatgagaagtcaaagggaaagcatgtgggtttcagaagcctccaggatgatcccaagctggtccactatatgaatgtggcaaagctgcagtctgatcgtgaatacaagaagaactatgagaacaccaaaaccagctaccatacccctggggacatggttagcatcacagctgcaaagatggcccaggatgtcgctaccaatgtcaactacaaacagccattgcatcattacacatacctacctgacgccatgagtcttgagcatacgaggaatgtcaatcaaattcagagtgataatgtgtataaagacgagtataacagcttcttgaagggcatcggatggatccctattggttccctggaggtggagaaggtcaagaaagcaggcgatgcattaaatgagaggaagtatcgacagcacccagataccgtcaagttcacaagtgtgcctgattccatgggcatggtgttggctcagcataacacaaagcagctaagtgatttgaactacaaggtagagggagagaaactgaagcacaagtatactattgaccctgaattgcctcagtttattcaagccaaagtcaacgccctcaacatgagtgatgctcattataaagcagattggaagaaaaccattgccaagggctatgatttgagaccagatgccatcccaattgttgctgcaaaaagttcaaggaatattgctagtgattgcaaatataaggaggcctacgagaaagccaaaggcaagcaagttggatttctcagtcttcaggatgatcctaaactggttcactacatgaatgtggccaaaatccagtctgatcgtgagtacaaaaagggctatgaagccagcaagaccaagtaccacacacctctggatatggtcagtgtgacagctgcaaagaaatctcaggaggttgccaccaacgccaactacagacagtcataccaccactacactctcctgcccgatgccttgaatgtggagcactccaggaatgccatgcagattcagagtgataatctgtacaaatctgacttcaccaattggatgaaagggatcggctgggtgcccatagagtccctggaggtggagaaggcaaagaaagcaggagagattcttagtgagaagaagtatcgccagcaccccgagaagctgaagttcacttacgccatggacacaatggaacaggcacttaacaagagtaacaaactgaacatggacaagaggctctacactgaaaaatggaacaaggacaagaccaccattcatgtcatgcctgacacaccggatattttactctccagagtaaaccaaatcaccatgagtgataaactgtacaaagctggctgggaagaggaaaagaagaaaggatatgacctgaggcctgatgccattgcaataaaggctgcaagagcctctagagacattgccagtgattacaaatacaagaaagcctatgaacaagccaaagggaaacacattggcttccggagcctggaagatgaccccaagctggtgcacttcatgcaagtggccaagatgcagtcagaccgggaatacaagaagggatatgagaaatccaagacctccttccacaccccggtggacatgctcagtgtggtggcagccaagaagtctcaggaagtggccaccaatgccaactacaggaacgtgatccatacctacaacatgcttcctgatgccatgagctttgaattggccaaaaatatgatgcagattcaaagtgataatcagtacaaggctgactatgctgacttcatgaagggcattggatggctccctctgggctccctggaagcagagaaaaacaagaaagccatggagattattagtgaaaagaagtaccgccagcacccagacactttgaagtattccacactcatggactcgatgaacatggttttggcccagaataatgcaaaaattatgaacgaacatctctacaaacaagcatgggaggctgacaaaaccaaagtccacatcatgcctgatatcccccagattattttggcaaaggcaaatgcaattaatatgagtgataaactctacaaactttccttggaagagtctaaaaagaaaggctatgatctcagacctgatgcaattcctatcaaagctgccaaggcttccagagatattgcaagtgattataaatacaagtacaattatgaaaaagggaaggggaaaatggttggtttccgcagtctcgaggatgatcccaaattagtccattccatgcaagtggctaagatgcaatctgatcgggagtacaagaaaaactatgagaacacaaagaccagctaccacacccctgccgacatgctcagtgtcacggctgcaaaggatgcccaagccaacatcaccaacactaactacaagcacctgattcacaagtacatcctccttccagatgcaatgaacattgagctgaccaggaatatgaatcgcatacagagtgataatgaatataagcaagattacaatgaatggtacaaagggcttggctggagtccagcaggttctctggaagtggagaaggccaagaaagcaactgaatatgccagtgatcagaaataccgccagcacccgagcaacttccagtttaagaagctgactgattccatggacatggtgcttgccaagcagaatgcacataccatgaacaagcatttatacaccattgattggaataaagataagaccaagattcatgtgatgcctgatacaccagatattttacaagccaagcagaatcaaacactgtatagtcagaaactctataaacttggatgggaagaagctttgaagaaaggctatgatctcccagttgatgcaatttctgtacagctagctaaagcttcaagagacattgctagtgattataaatacaaacaaggctaccgaaagcaacttggccaccatgttggattccggagtctgcaagatgacccaaaacttgtgttgtccatgaatgtagccaaaatgcagagtgaaagagaatacaagaaggactttgagaagtggaaaactaagttctccagcccagtggacatgttgggagtggtactggccaagaagtgtcaggagttggttagtgacgtggactacaagaactacctgcatcagtggacatgtctgcctgatcagaacgatgttgtgcaagctaagaaagtttatgaactgcaaagtgagaatctatataaatctgaccttgagtggctgagaggcataggatggagtcccttgggttctttagaggcagaaaagaacaagcgggcttcggaaatcatcagtgagaagaaatatcgtcagcctccagacagaaacaagttcaccagcattcctgatgccatggatatagttctggcaaagacaaatgccaaaaataggagtgatagactttatagagaagcttgggacaaagacaagactcagatccacatcatgcctgatacacctgacattgttctggctaaagcaaacttaatcaacacaagtgataaactctaccgaatgggttatgaggagctgaagagaaaaggttacgatcttcctgttgatgccataccaatcaaagcagcaaaagcctcccgggaaattgccagtgaatacaagtacaaggaaggctttcgcaagcagctcggccaccacattggtgcccggaacattgaagatgaccccaagatgatgtggtccatgcatgtggccaagatccagagtgacagggagtacaagaaggactttgagaagtggaagaccaagttcagcagcccagtggacatgctgggggtggtgttggccaagaagtgccagaccttagtcagcgacgtggactacaagaactacctgcaccagtggacatgcctgcccgaccagagcgatgtcatccatgctcggcaggcctatgacctccagagcgataatttgtacaagtcagaccttcagtggctaaaaggcattggctggatgactagtggttctctcgaggatgagaaaaataaacgagccacccagattttgagtgaccatgtttaccgtcagcacccagatcaatttaagttttccagccttatggattccataccaatggttttggcaaaaaacaatgctattaccatgaatcatcgcctctatacagaagcttgggataaagataaaaccactgtccacattatgccagatacccctgaagttttattagctaaacaaaacaaagtaaattacagtgagaaattgtataagcttggcctagaagaagccaagaggaaaggttatgacatgcgggtagatgccattcctatcaaggcagccaaggcctccagagatattgcaagtgaattcaagtacaaagaaggctatcgtaagcagctcggccaccacattggtgcccgagctatacgtgatgaccccaagatgatgtggtccatgcacgtggccaagatccagagtgacagggagtacaagaaggactttgagaagtggaagaccaagttcagcagcccagtggacatgctgggggtggtgctggccaagaagtgccagaccttagtcagcgatgtggactacaagaactacctgcaccagtggacatgcctgcccgaccagagcgacgtcatccatgctcggcaggcctatgacctccagagcgataatatgtacaagtctgatctccagtggatgagaggcattggctgggtgtccattggctctttggatgtggaaaaatgcaaaagggcaactgaaattttgagtgataaaatctatcgccagcctccagacagattcaaatttaccagtgtgactgactctctggaacaagtgctggccaagaacaatgctctcaacatgaataagcgtttatacacagaggcctgggacaaagacaagactcaaattcacataatgcctgatacaccagagattatgttggcaaggcagaacaaaatcaactacagtgagactctatacaaacttgccaatgaagaagcaaaaaagaaaggctacgacttgcgaagtgacgccatccccatcgtggctgccaaggcctccagggacgttatcagtgattacaaatacaaagatggttaccgcaagcagctcggccaccacattggagcccggaacattgaagatgaccccaagatgatgtggtccatgcatgtggccaagatccagagtgacagggagtataagaaggactttgagaagtggaagaccaagttcagcagcccagtggacatgctgggagtggtgttagccaagaagtgccagaccttagtcagcgatgtggactacaagaactacctgcacgagtggacgtgcctgcccgaccagaatgatgtcatccatgctcggcaggcctatgacctccagagcgataacatttacaaatctgatctccagtggctgagaggcattggctgggtccccattgggtctatggatgtggtcaagtgcaagagagctgctgaaatactgagtgataacatctaccgccagcctccggacaagctgaaatttaccagtgtgactgactctctagagcaggtgctggccaagaacaatgctctcaatatgaacaagcgcttatacacagaagcctgggacaaagacaagacccaagtccatattatgcctgatacacctgaaatcatgttggcaagacaaaataaaataaattatagtgagagcctctatcgtcaggccatggaagaagccaagaaagaaggctatgacttgagaagtgatgccattcccattgtggctgccaaggcctctcgggatattgccagtgattacaaatacaaagaagcatatcgtaaacagttgggtcaccacattggcgcccgagcagtacacgatgaccccaagataatgtggtccctccacattgccaaagtgcagagtgaccgtgagtacaagaaagattttgagaaatacaagacaaggtacagcagcccagtggacatgcttggtatcgttttggccaagaagtgtcagaccttggtcagcgatgtggactataaacatcctctgcatgaatggatctgcctgcccgaccagaatgacatcattcatgcacggaaagcctatgacctccagagtgacaatttgtataagtcagaccttgaatggatgaaaggcattggctgggttccgattgattccttggaagttgttagggccaagagagctggagaattacttagtgatactatctaccgtcagcgtccagaaacgctgaaatttaccagtataacggacactccggagcaggtgctggcaaaaaacaatgctttaaacatgaataagcgcttatatactgaagcctgggacaatgacaagaaaactattcatgtcatgcctgatacaccagaaatcatgttagccaaactcaaccgaataaactacagtgataaactctataaacttgctttggaagagtccaagaaggaaggctatgacttgcgtctggatgccattccaatccaagcagccaaggcttcaagagatattgctagtgattacaagtacaaggaaggctaccgcaaacagcttggccaccatattggggcccggaacattaaggatgacccgaagatgatgtggtccatccatgtggccaagatccagagtgacagggagtacaagaaggagtttgagaagtggaagaccaagttcagcagcccagtggacatgctgggggtggtgctggccaagaagtgtcagatccttgtaagcgacatagactacaagcatcccctgcatgaatggacctgcctgcctgatcagaatgacgtcattcaggctcggaaggcctatgacctgcagagtgatgctatttacaaatctgatcttgagtggctgagaggcataggatgggttcccattggctctgtagaggtcgagaaagtgaagagagctggagaaatcctgagtgacaggaagtatcgccagcctgcagaccagctcaaattcacatgcattaccgacactccggaaattgtcctagcaaagaataatgccctgacaatgagcaagcatttatacacagaagcttgggatgctgacaaaacctccatccacgtgatgccagacaccccagatatcctgctggccaagagtaattctgccaatatcagccaaaaactttacaccaagggatgggatgaatcaaagatgaaggactatgatctgagagcagatgctatttccatcaaaagtgccaaggcctccagggacatcgccagtgactacaaatacaaggaagcctatgagaaacagaaaggccaccacattggagcccagagcattgaagatgatcccaagattatgtgtgccatacatgcaggaaaaattcaaagtgaaagggagtacaagaaggaattccaaaagtggaaaaccaagttctctagcccagtggacatgttaagcatcttgctggccaagaaatgtcagactttggtcactgacattgattatcgcaattacctgcatgaatggacatgcatgccggatcaaaacgacattatccaagcaaaaaaggcctatgacctgcagagtgatgccctctacaaggctgacttggagtggttgcgtggcattggctggatgccccaagggtctcctgaagtgttgagagtcaaaaacgcccagaatatcttttgtgacagtgtctatcggacgcctgtggtgaaccttaagtacacaagcattgttgacacacctgaagtggtccttgctaaatcaaatgctgaaaatattagtattccaaagtacagagaggtttgggacaaggataaaacttcaatacacataatgccagatactccagaaattaatctcgctagagcaaatgctcttaatgtgagcaataaactttaccgtgagggctgggatgaaatgaaggcgggctgtgatgtccggctggatgccatccccatccaggctgccaaggcctccagggagattgccagtgactataaatataagcttgaccatgagaagcagaagggacactacgtgggcaccctcacagccagggatgacaacaagatccgctgggccctcatagctgacaagctccagaatgaacgagagtaccggctggactgggccaaatggaaggccaagatccagagccctgtggacatgctttccatcctgcactctaaaaattcccaggctctggtcagtgacatggattaccgcaattacctgcaccagtggacctgcatgcccgaccagaacgatgtgattcaggccaagaaggcctacgaactgcagagcgataatgtttacaaggctgacttggaatggttgcgtggaattgggtggatgccaaatgactccgtgtccgtcaatcatgccaaacatgccgcggacatcttcagtgagaaaaaatatcgcacaaaaatagaaactctcaactttacgcctgtggatgacagagttgattatgtgacagcgaaacaaagtggcgagatcctcgatgatattaaataccggaaagactggaatgccaccaaatcaaagtacaccctcacagaaacccccctgctgcacactgcccaggaggctgctaggatactggaccagtatctctacaaggaaggctgggagagacaaaaagccacaggttacattttgcctccagatgctgtgccatttgttcatgcccatcactgcaatgacgttcagagtgagctgaaatacaaagctgaacatgtgaagcaaaaaggtcattatgttggtgtcccgacgatgagagatgatcctaagctggtttggtttgagcatgcaggccagattcagaatgagagactatacaaagaggactatcacaaaacaaaggccaaaatcaatatacctgctgatatggtgtcagtcttggccgccaagcaggggcagacccttgtcagtgatattgattatcgtaattacttgcaccaatggatgtgtcatcctgaccagaacgatgttattcaggcaagaaaggcctatgacctacagagtgataatgtctacagagctgacctggagtggctccgaggcattggctggatcccactggattctgtggaccatgtaagggttactaagaaccaggaaatgatgagtcagatcaaatataagaaaaatgcccttgaaaactatcctaactttagaagtgtggtggatcctccagagattgttttagccaagattaattctgtcaatcaaagtgatgtaaaatataaagaaacatttaataaagcaaagggcaaatatacgttttcaccagatacaccacatatctcccactccaaagacatgggaaaactctacagtactatactgtataaaggggcgtgggagggcaccaaggcctatggctacaccctggatgagcgctacattcccattgttggagccaagcatgctgatctggtgaacagtgagcttaaatacaaagagacatatgagaagcagaaaggtcactacctggctggaaaagtgatcggtgaattccctggtgtggttcactgtctggatttccaaaagatgaggagtgcgttgaactacagaaaacattatgaggataccaaagcaaatgttcatatccccaatgacatgatgaatcacgtgctggctaaaaggtgccagtacatcctcagtgacctggagtatcgacactatttccaccagtggacgtctcttctggaagaacccaatgttatacgcgtccgaaacgcccaggagatcttgagtgataatgtgtataaagatgacctgaattggttgaaaggcattggttgctacgtttgggatacaccccaaatcctccatgccaagaaatcatacgaccttcagagtcagctacaatatacagcagcaggtaaagaaaatctacaaaactataatctggtcacagacacgcccctctatgtgactgctgttcagagtggcattaatgccagtgaggtaaaatataaagaaaattatcatcagattaaggacaaatacacaacagttctagaaacagtggattatgacagaaccagaaacctgaagaatctttacagcagtaacctgtacaaggaggcctgggatagagtgaaagccaccagctacatcctgccttccagcaccttgtccctgacacacgccaagaaccagaagcatctggccagccatatcaaatatcgggaagaatatgaaaagttcaaagctctttatacgttaccaagaagtgttgacgatgatccgaacacagcacggtgcctccgagttggcaagcttaacatcgatcgcctgtacagatcagtttatgaaaagaacaagatgaaaatccacatcgtgcccgacatggtagagatggttactgccaaggattcccagaagaaagtcagtgagattgattaccgcctgcgcctccacgaatggatttgccaccccgacttgcaagtcaatgatcacgtcaggaaagtcacagatcagatcagcgatattgtatacaaggatgacctcaactggctgaaaggcattggttgctacgtctgggacactcctgaaatcctccatgccaagcatgcttatgatctacgtgatgatatcaagtataaagctcacatgttgaaaacaaggaatgactacaagcttgtcacagatacaccagtctacgtgcaggctgtcaaaagtgggaaacagctaagtgacgctgtctaccactatgactatgtgcacagtgtcagaggcaaagtggctccaactaccaaaaccgtggatctggaccgggcccttcatgcatacaagctccagagttcgaatctatacaaaaccagcctgcgcaccctgcccactggatatagacttccaggtgacactcctcacttcaaacacatcaaggacacccgttacatgagcagttatttcaagtacaaagaagcctatgaacacaccaaggcatatgggtatacacttggccccaaagatgttccatttgtccacgtccggagagtcaacaatgttaccagcgagagactgtatcgggaattgtaccacaaactgaaagacaagatccatacaactcccgatacccctgagatccgccaagtcaagaagacacaagaggctgtcagtgagttgatctacaaatcagacttcttcaagatgcagggccacatgatctctctgccatacacaccccaagtgatccattgccgctatgtgggagacatcaccagtgatattaaatacaaagaggacttgcaggtcctgaagggatttggctgcttcctgtatgacactcctgacatggtccgctcccggcacctgcggaagctctggtctaattacctatacactgataaggcaaggaagatgcgagacaaatacaaagtggtgcttgacactccagaatacagaaaagtgcaagaactgaagacacatctgagtgagctggtctacagagctgcaggcaagaagcagaagtcaatctttacttcagttcctgatactcctgatcttttaagagccaagcgagggcagaagcttcagagtcagtatctgtatgttgaacttgccaccaaagagagaccccatcatcacgctggaaaccagaccacagccttgaagcatgctaaagacgtgaaggacatggtcagtgagaaaaagtacaagattcaatatgaaaagatgaaagacaagtacactccggttccagatacgccaatcctcatcagagccaagagggcttactggaatgccagtgatctacgctacaaagaaacatttcaaaagaccaaagggaaataccacacggtgaaagatgccctagacattgtctatcatcgcaaagtcacagatgacatcagtaaaataaaatacaaggagaactacatgagccagttgggtatctggaggtccattcctgatcgtccagagcatttccaccaccgagcagtcactgacacagtcagtgatgtaaaatataaagaagacttgacttggcttaaaggcattggttgctatgcctatgatacccctgatttcactctggctgaaaagaacaagactctctacagcaagtataagtataaagaagtatttgaaaggacaaagtcagatttcaagtatgttgccgactctccgatcaataggcatttcaagtatgcaactcaattgatgaatgagaaaaaatacagagctgattatgagcagcggaaagataaataccacctggtagtcgatgagcctagacatctgctggctaagaccgcaggcgaccagatcagtcagatcaaatacaggaaaaactatgaaaaatcaaaggacaaatttacctcaattgtggatactccagaacacctgcgtactacaaaagtcaacaaacaaatcagcgatatcctttataaattggaatacaacaaggccaaacccagaggctacaccacaatccacgacacacccatgttgctgcatgtccgcaaggttaaagatgaagtcagtgatctgaaatacaaagaagtataccaaagaaataaatccaactgcaccattgagccagatgctgttcatatcaaagcagccaaggacgcctacaaagtcaacaccaatctggactataagaaacagtacgaagccaacaaagcccactggaagtggactcctgaccgaccggacttcctccaggctgccaagtcatccctgcagcaaagcgattttgaatataagctggaccgggagttcctcaagggttgcaagctttctgtcactgatgacaaaaacacggtgctcgccctcaggaatactttaatagaaagtgatctgaaatacaaagagaaacatgtcaaggaaagaggaacctgccatgccgtacctgacacgcctcagatcctgctggcgaagactgtcagcaacctggtgtctgagaacaagtacaaggaccatgtcaagaagcacttggcacagggctcatacacaacactaccagagacccgggacactgttcacgtcaaggaagtgaccaagcatgtcagtgatacaaattacaaaaagaagtttgtcaaggagaaaggaaaatccaactactccatcatgctggagccaccagaggtgaaacatgctatggaagtggccaagaagcaaagtgatgtcgcttacagaaaagatgccaaagagaacctgcattacaccacagtggctgatcgaccagacatcaagaaggccacacaggcagccaaacaggccagtgaggtggagtacagagccaagcaccgcaaggaaggcagccatggcttaagcatgctcggtcgcccagacatagaaatggccaagaaggcagccaagctgagcagccaggttaaataccgagaaaatttcgataaagaaaagggcaagacaccaaaatacaatccaaaagacagccagctctacaaagtcatgaaagatgctaataatcttgcaagtgaggttaaatacaaggctgacctgaagaaacttcacaaacccgtgactgacatgaaggagtctctgatcatgaatcatgtcctgaatacaagccaacttgccagttcttaccagtacaagaagaagtatgagaagagtaaaggccactaccacaccatacccgataatctggagcagcttcacctaaaagaggccacagaattacagagtatagtgaaatacaaagaaaagtatgaaaaggaacgaggaaaacccatgctggactttgaaacaccaacgtacatcactgccaaagagtctcagcagatgcagagtgggaaagaatataggaaagattatgaagagtccattaaaggcagaaacctgactggcctggaggtcacgccagctttgttacatgtcaaatatgcaactaaaatagcaagcgagaaagagtacaggaaagatctagaggaaagcatccgtgggaagggcctcactgaaatggaagatacacctgacatgctaagagcaaagaatgccactcaaatcctcaatgagaaagaatataagcgagacctggaactggaagtcaaaggaagaggcctgaatgccatggccaatgaaactccggattttatgagggccaggaatgctactgatattgccagtcagattaagtataagcaatcagcagaaatggagaaagccaatttcacttctgtggttgatactccagagatcattcatgcccaacaagtcaagaatctttcaagccagaaaaagtacaaggaagatgctgagaagtccatgtcgtattatgagactgttttggacaccccagagatacagagagtccgggagaaccaaaagaacttcagccttctccaataccagtgtgaccttaaaaacagtaaaggaaaaattacagttgttcaagacacgccagaaatactgcgtgtaaaagaaaatcagaagaatttcagctcggttttatataaagaggatgtctcaccaggaacggctatcggaaagacacctgagatgatgagagtgaaacaaacacaggaccacattagctcggtgaagtataaggaagcaataggacaaggaactccaatccctgacctgcctgaagtgaaacgtgtgaaggagacgcagaagcacattagctcggttatgtacaaagaaaacttgggaacaggcattccaaccactgtgactccagagattgagagagtcaaacgcaatcaagagaactttagctcggttttgtacaaagaaaatttggggaaaggaatcccaacacctatcactccagagatggagagagtcaaacgcaatcaagagaactttagctcggtgttatacaaagaaaacatgggcaagggaactcctttagctgtcactcccgagatggagcgagtcaaacacaatcaagaaaatattagctcggttttgtacaaagaaaatgtggggaaagccaccgcaacccctgtcactcctgagatgcagagagtcaaacgcaatcaagaaaacattagctcggtgttatacaaagagaacctggggaaagcaacccccacaccctttactcctgagatggaaagagtgaaacgcaatcaagaaaactttagctcggtattgtacaaagagaacatgagaaaagcaactccgacacctgttactccagagatggagagagctaagcgcaaccaagaaaacattagctcggttctttattctgatagtttccggaaacaaatacaaggcaaagctgcctatgtattggatacccccgagatgagacgggtgagggagacccaacggcacatctcaacggtgaaatatcatgaagactttgagaaacacaagggttgcttcacaccagtggtgacagatcctatcactgaacgagtaaagaagaacatgcaggacttcagtgacattaactaccgaggtattcagaggaaagtggtagaaatggaacaaaaacggaatgaccaagatcaggagactattacaggtttacgtgtctggcgtactaatcctggttcggtttttgactatgatccagcagaagacaacatccagtcccgaagcttacacatgattaatgtccaagctcagcgccggagccgggagcagtcacgatctgccagtgcactaagcatcagtgggggtgaggagaagtctgagcattcagaagcaccagaccaccacctttcgacttacagcgacgggggtgtctttgcagtctcaacagcttacaaacatgcaaaaaccacagagctcccacaacaacgatcatcttcagttgctacccaacagacaacggtatcttccatcccatctcatccatctactgctggaaaaatcttccgtgccatgtatgactatatggctgctgatgcagatgaggtgtccttcaaggatggagatgccatcataaatgttcaagcaattgatgaaggctggatgtatggcactgtgcagaggactggcaggaccggaatgctcccagccaactacgttgaagctatttaggcatttcaaagcatcacacttgtctgcaggacttacagatcctgcagtcaatgtttcggtttagactctccactgttacctaagttctcaagctgcctatggtttttctgtgtcaatgtgatttatggtagtaccatcctttctcctttgggttttaaaataagttgcagaacagacactttaaaagcttctgcaatattatttctgtgcctagagtctttctccattataaacatgttttaacattatttcttttctaaaacagggattttgaatatgccaaacacattaaaggaaaaatagcagagatgttcaccttttccttgctgattgctaatgcttattatttctaattcagttctgaagttataaacttataatcaatacaaaccagcaactaataaaacctctaattctgcaa

SEQ ID NO: 522 - DNA, 3412 bp, Homo sapiens
  MTM1 (myotubularin 1) (X-linked myotubular myopathy)
agccgagcagcctggcaacggcggtggcgcccggagcccgagagtttccaggatggcttctgcatcaacttctaaatataattcacactccttggagaatgagtctattaagaggacgtctcgagatggagtcaatcgagatctcactgaggctgttcctcgacttccaggagaaacactaatcactgacaaagaagttatttacatatgtcctttcaatggccccattaagggaagagtttacatcacaaattatcgtctttatttaagaagtttggaaacggattcttctctaatacttgatgttcctctgggtgtgatctcgagaattgaaaaaatgggaggcgcgacaagtagaggagaaaattcctatggtctagatattacttgtaaagacatgagaaacctgaggttcgctttgaaacaggaaggccacagcagaagagatatgtttgagatcctcacgagatacgcgtttcccctggctcacagtctgccattatttgcatttttaaatgaagaaaagtttaacgtggatggatggacagtttacaatccagtggaagaatacaggaggcagggcttgcccaatcaccattggagaataacttttattaataagtgctatgagctctgtgacacttaccctgctcttttggtggttccgtatcgtgcctcagatgatgacctccggagagttgcaacttttaggtcccgaaatcgaattccagtgctgtcatggattcatccagaaaataagacggtcattgtgcgttgcagtcagcctcttgtcggtatgagtgggaaacgaaataaagatgatgagaaatatctcgatgttatcagggagactaataaacaaatttctaaactcaccatttatgatgcaagacccagcgtaaatgcagtggccaacaaggcaacaggaggaggatatgaaagtgatgatgcatatcataacgccgaacttttcttcttagacattcataatattcatgttatgcgggaatctttaaaaaaagtgaaggacattgtttatcctaatgtagaagaatctcattggttgtccagtttggagtctactcattggttagaacatatcaagctcgttttgacaggagccattcaagtagcagacaaagtttcttcagggaagagttcagtgcttgtgcattgcagtgacggatgggacaggactgctcagctgacatccttggccatgctgatgttggatagcttctataggagcattgaagggttcgaaatactggtacaaaaagaatggataagttttggacataaatttgcatctcgaataggtcatggtgataaaaaccacaccgatgctgaccgttctcctatttttctccagtttattgattgtgtgtggcaaatgtcaaaacagttccctacagcttttgaattcaatgaacaatttttgattataattttggatcatctgtatagttgccgatttggtactttcttattcaactgtgaatctgctcgagaaagacagaaggttacagaaaggactgtttctttatggtcactgataaacagtaataaagaaaaattcaaaaaccccttctatactaaagaaatcaatcgagttttatatccagttgccagtatgcgtcacttggaactctgggtgaattactacattagatggaaccccaggatcaagcaacaacagccgaatccagtggagcagcgttacatggagctcttagccttacgcgacgaatacataaagcggcttgaggaactgcagctcgccaactctgccaagctttctgatcccccaacttcaccttccagtccttcgcaaatgatgccccatgtgcaaactcacttctgaggggggaccctggcaccgcattagagctcgaaataaaggcgatagctgactttcatttggggcatttgtaaaaagtagattaaaatatttgcctccatgtagaacttgaactaacataatcttaaactcttgaatatgtgccttctagaatacatattacaagaaaactacagggtccacacggcaatcagaagaaaggagctgagatgaggttttggaaaaccctgacacctttaaaaagcagtttttgaaagacaaaatttagatttaatttacgtcttgagaaatactatatatacaatatatattttgtgggcttaattgaaacaacattattttaaaatcaaaggggatatatgtttgtggaatggattttcctgaagctgcttaacagttgctttggattctctaagatgaatccaaatgtgaaagatgcatgttactgccaaaaccaaattgagctcagcttcctaggcattacccaaaagcaaggtgtttaagtaattgccagcttttataccatcatgagtggtgacttaaggagaaatagctgtatagatgagtttttcattatttggaaatttaggggtagaaaatgttttcccctaattttccagagaagcctatttttatatttttaaaaaactgacagggcccagttaaatatgatttgcattttttaaatttgccagttttattttctaaattctttcatgagcttgcctaaaattcggaatggttttcgggttgtggcaaaccccaaagagagcactgtccaaggatgtcgggagcatcctgctgcttaggggaatgttttcgcaaatgttgctctagtcagtccagctcatctgccaaaatgtagggctaccgtcttggatgcatgagctattgctagagcatcatccttagaaatcagtgccccagatgtacatgtgttgagcgtattcttgaaagtattgtgtttatgcatttcaatttcaatggtgttggcttcccctccccaccccacgcgtgcataaaaactggttctacaaatttttacttgaagtaccaggccgtttgctttttcaggttgttttgttttatagtattaagtgaaattttaaatgcacagttctatttgctatctgaactaattcatttattaagtatatttgtaaaagctaaggctcgagttaaaacaatgaagtgttttacaatgatttgtaaaggactatttataactaatatggttttgttttcaatgaattaagaaagattaaatatatctttgtaaattattttatgtcatagtttaattggtctaccaagtaagacatctcaaatacagtagtataatgtatgaattttgtaagtataagaaattttattagacattctcttactttttgtaaatgctgtaaatatttcataaattaacaaagtgtcactccataaaaagaaagctaatactaatagcctaaaagattttgtgaaatttcatgaaaactttttaatggcaataatgactaaagacctgctgtaataaatgtattaactgaaacctaa

SEQ ID NO: 523 - DNA, 3178 bp, Homo sapiens; identical to SEQ ID NO: 468
  Lamin A/C (LMNA; LMN1; PRO1; LMNL1)

SEQ ID NO: 524 - DNA, 1281 bp, Homo sapiens; identical to SEQ ID NO: 467
  Emerin (EMD)

SEQ ID NO: 525 - DNA, 2243 bp, Homo sapiens
  Desmin (DES; CMD1I, CSM1, CSM2)
gtctcccctcgccgcatccactctccggccggccgcctgcccgccgcctcctccgtgcgcccgccagcctcgcccgcgccgtcaccatgagccaggcctactcgtccagccagcgcgtgtcctcctaccgccgcaccttcggcggggccccgggcttcccactcggctccccgctgagttcgcccgtgttcccgcgggcgggtttcggctctaagggctcctccagctcggtgacgtcccgcgtgtaccaggtgtcgcgcacgtcgggcggggccgggggcctggggtcgctgcgggccagccggctggggaccacccgcacgccctcctcctacggcgcaggcgagctgctggacttctcactggccgacgcggtgaaccaggagtttctgaccacgcgcaccaacgagaaggtggagctgcaggagctcaatgaccgcttcgccaactacatcgagaaggtgcgcttcctggagcagcagaacgcggcgctcgccgccgaagtgaaccggctcaagggccgcgagccgacgcgagtggccgagctctacgaggaggagctgcgggagctgcggcgccaggtggaggtgctcactaaccagcgcgcgcgcgtcgacgtcgagcgcgacaacctgctcgacgacctgcagcggctcaaggccaagctgcaggaggagattcagttgaaggaagaagcagagaacaatttggctgccttccgagcggacgtggatgcagctactctagctcgcattgacctggagcgcagaattgaatctctcaacgaggagatcgcgttccttaagaaagtgcatgaagaggagatccgtgagttgcaggctcagcttcaggaacagcaggtccaggtggagatggacatgtctaagccagacctcactgccgccctcagggacatccgggctcagtatgagaccatcgcggctaagaacatttctgaagctgaggagtggtacaagtcgaaggtgtcagacctgacccaggcagccaacaagaacaacgacgccctgcgccaggccaagcaggagatgatggaataccgacaccagatccagtcctacacctgcgagattgacgccctgaagggcactaacgattccctgatgaggcagatgcgggaattggaggaccgatttgccagtgaggccagtggctaccaggacaacattgcgcgcctggaggaggaaatccggcacctcaaggatgagatggcccgccatctgcgcgagtaccaggacctgctcaacgtgaagatggccctggatgtggagattgccacctaccggaagctgctggagggagaggagagccggatcaatctccccatccagacctactctgccctcaacttccgagaaaccagccctgagcaaaggggttctgaggtccataccaagaagacggtgatgatcaagaccatcgagacacgggatggggaggtcgtcagtgaggccacacagcagcagcatgaagtgctctaaagacagagaccctctgccaccagagaccgtcctcacccctgtcctcactgctccctgaagccagccttcttccatcccaggacaccacacccagcctcagtcctcccctcacagcctctgacccctcctcactggccatccctcgtggtccccaacagcgacatagcccatccctgcctggtcacagggcatgccccggccacctctgcggaccccagctgtgagccttggctgttggcagtgagtgagcctggctcttgtgctggatggagcccaggcgggagcggtggccctgtccctcccacctctgtgacctcaggcactagcctttggctctggagacagccccagagcagggtgttgggatactgcagggccaggactgagccccgcagacctccccagcccctagcccaggagagagaaagccaggcaggtagccagggggactagcccctgtggagactggggggcttgaaattgtccccgtggtctcttactttcctttccccagcccagggtggacttagaaagcaggggctacaagagggaatccccgaaggtgctggaggtgggagcaggagattgagaaggagagaaagtgggtgagatgctggagaagagaggagaggagagaggcagagagcggtctcaggctggtgggaggggcgcccacctccccacgccctcccctcccctgctgcaggggctctggagagaaacaataaagagattcacacacaa

SEQ ID NO: 526 - DNA, 9383 bp, Homo sapiens
  Delta-sarcoglycan (SGCD; DAGD, LGMD2F, CMD1L)
agagctgctcagcacgccctgggatcgcgggcggttttcatcggccggtttgtgaaacggacaagagagagacattactgccgggagtgttgagtgaagggaccaggtggagatgatgcctcaggagcagtacactcaccaccggagcaccatgcctggctctgtggggccacaggtatacaaggtggggatttatggctggcggaaacgatgcctgtatttctttgtcctgctcctcatgattttaatactggtgaacttggccatgaccatctggattctcaaagtcatgaacttcacaattgatggaatgggaaacctgaggatcacagaaaaaggtctaaagctagaaggagactctgaattcttacaacctctctacgccaaagaaatccagtcccgaccaggtaatgccctgtacttcaagtctgccagaaatgttacagtgaacattctcaatgaccagactaaagtgctaactcagcttataacaggtccaaaagccgtagaagcttatggtaaaaaatttgaggtaaaaactgtttctggaaaattgctcttctctgcagacaataatgaagtggtagtaggagctgaaagattacgagttttaggagcggagggcacagtgttccctaaatctatagaaacacctaatgtcagggcagaccccttcaaagaactaaggttggagtccccaacccggtctctagtgatggaggccccaaaaggagtggaaatcaatgcagaagctggcaatatggaagccacctgcaggacagagctgagactggaatccaaagatggagagattaagttagatgctgcgaaaatcaggctacctagactgcctcatggatcctacacgcctacaggaacgaggcagaaggtcttcgagatctgcgtctgcgccaatgggagattattcctgtctcaggcaggagctgggtccacttgtcagataaacacaagtgtctgcctctgaaagactatccatagtggacattgttggcagcataaaggccttttttggctttagacactggctgccagctatttttactagaacacagaaagcctatcaaagaccttgtgtgtatgtgtacgtgtgtgtgcgtgcttgagtgtgttcgcgtgtgtgggtggatataaatatatataaatatatataaataaatatatatatcctctgtataaaatgaggtttcagtacaaaaggaaccatgggtgaccctgcgatatccactgtcattttccatcccatccccaccacctgagtgacagaaatctaaacacacatccgtcccaacattccccagaccattcagaatcacacagcgtattaaacactgacagaatcttcatctagatattcgagtagcagcatatcttctcttttagtgtcattacgagggagtgatggcgggaatctcagtcgcactcaagctctgagacctttgtatcaaaaataggcatttgatttcctgttttagctttagtaaggctggctaacttccccctcttcaagctaggaactggcaatgctgtagaagtcagccgtaggaattcaaaatggctggcctaccttggctaccagacatattggggtttttgtagttgaatgaatgaggaggatgaatttcagcaaattttgaactgctcacccaacttctgctatcttgctccctccaaactcacagattctcctacagtcaaattaggagctgtaaatcagcacaaaataagataacagctgttcctcagtgagctggaagctacttaatggcctgatgggcaatgaacaaacgggtgatatgtctctgtttaagggaaaaatggcttaaaagctgttctgttctcacttctgactttaaccaaaagatttcaacccacaatgatcaggtcaatcaaaatccctaagagcagaactcctaccccaaaagaagcctggaagtctaattaagagtagcataaggaacctaattatgtttaccatgtttcttgggattggtgggaaatgtcaaaacatgccctttatttttaaaggcattcacaaactctctgactttgttcttcttatatattttttcagtgccgggatattcatattcctaaagccactattgtgttttctctaagaagcactacatgccaccagaattgtgcactgaaagataatacaaactgagtgtctttatgagaatcactgtgtcccctgaggcccagcagtacctgcttccctgtatgtggaagcagcacctcattcccgccatcagctacctctcatcaccccaccttcatcatcatgctccagggtcaccctggccagctcttgtgctgggacaggggattacaccatctctgttcaaagagggggaaatgtgcctatgccttaagtcaatgcactcagcaaggagaagcacatcttatttatcttgttacctatagtttactttgggtgattggaggggaatgacttagttatgactggacatcttaaaagctgatagacaagccaaatggctggcagatgatgtggatttcaaagagcccagaatgaactcatcactggcttagacagtcctggatgccatttggaaagtagtggccctgcaagcctaaatgaagtagtatttgtaggcctgggtggcatttggatttttcttttccctcaacaaggttttactttttcttactttacaagcaagggaagttttgtgataggagagaaataaaagatttgatattttttgagatgacactcaagcatcaggctgagatttgcacacatgggatgtaaaagcaagctgtgtgttgcttagtcacttacttagaagtagatggtgggggacagcggcgtgggtcctagcctggccagtgatgctgctggcgtccagaccccagactcactccaagcactcttgttcaatatctcatgcagaagagttgggctggtcactcttaggggtgagaccccgtgattggttggtttgtagcactaaggtctaaaaaggaaaaccataaaagacatcagattacgctggatcagtataattaatattccatagggccatgttgccagaatctgtatgtatcaatacagggtttttccaagccaggaaacgccctccttggctactaggagcacctatcccatatcattcagataaacaatgatagctacaaagtcatttgtggctagataggttaagacaggtgattttttaaagtagactgtctttgcattttgccatctgaagttcattaatctttagatgacaaaaaagcaaaaagttcccagaacgtttttgcttagattttgttctaatcaccacgtgaaggaatgagattagcaccacaagtttcatgccaataaaagagactggtgtgatcccacatgcaaaatttaatcctaagggtagtgagatcacaaacagaataaaaataagagcaatcaaccatataaatcaagtacctattgggaacagacataacattcaatttttcatttatgctaagtgaccacagtatacaaagtaataagcaggaaatttgatatgggttaaattatgcattttgttcagattttggaaattggtatgcattataagtttctcaatgtacatctttttatcccaacaccctcaaactagaatatttgtcagtggtcaagagaaaaaattttacctgaattcttgggggccggcggggagcttttacattaaaaatctactaacgcctactttttaaaaaatgagattctttctaatctttatatatgacattttctagacaatcgcacctttgggtatattaaacagctggtatcataacaaagaatccaaatgaaccttcaatatactagaagttctagtaggttaatattgttcagaagatttttacaaattaaaaactgatttccaaatatgttcaacatttacttctatttgatatctgctcaagaagtcatagaagtcttgggaaactattcgagtatcacagaggttttcaaaagcccttatggtgacatctacctaggtaaaagcctgacatgtggctttataattgttatgttacccaagggataaacttgaactggctttgaacatcctttaggtcattttctctttggataattttcatcgcatatccagcaactatagaccaaagtttgcttaaggtttgaccctagagcagaggtgggcaaactatgacctggaaaccaaatctgacttaccaccttttcctgtagttaaagttttattgtcacatagccacatacattcatttacatgttttctgattttacactacagcagcaggatggagtagttgtgtcagagactatgtatcccacaaagcatagattacttactatttagtcctttacaggcaaagtttcctcacccctgacctagaggtttttgtggtatgcattggatatagcaggaaagaaagcacatttccaaacagcagggagtaagcttacatttctgtgtaggtttgggaatatagttacttggcaaagtctttcaggaaggaagcccttccttatgttacatgtggaaagcctgccttccaagacatgtggaagtaattgatccacctgccagagaaacacaggctcagaggatgcctgggaacagggaggatgggattagtggaagcttaatggaaaaggaaagttatgatcctccaagacccttaattgatagaccataccaggttctgcaggtcagcatcattgtgtaatgagagtgaagtaggggaccctgtggttcaaccttagaatctgtttcctgtaggctctttctgctgtctatattcattaaagttttccacttcaccctcccatagtctagagggatgcccattccatggtcctccagagaatagttttgacttaacatgtctgtttagcccacatcacgtcagttatcaacaccgccactgtgcttactgttcctacagccacaccaggcttgaagagttagtgagaccaacaaataattggaagtattggaaaaagcaaaatacatggggacaaaaaaaatacagtgaaattctttttatcaaactgatgctgtgagaaaccagatgaatgccagtttggctttatttctaagaatctgggtcttcattctctggtgtagaaggaatgcaaaaaactataacaacaacaacaaaaacatattttgaaaagacatattctgacatctctgcttgtgtgtggtaaggcaggttcctatcagacatttatccctttggtcaagatcccttttgctcatccagggtttcatactcaatatcgcttaaaaaaaaaaaagtatcagctagggatgactctggaagtatgagtatcatggtggggaggaaggaattttttttaaatgtaaatgacccccatttaccagaccctaatcaaagtcacttaagggaatccctcagccttttatttggaaacagttgaaataaactggcagcagctagatcagagtatcttgctttattttataaaggccaaaggtagtatgaagtttggaccaaaaaggtaaatagatccattccagcacctgatactgatttttcaaggctctatgaaaggtcaaaaatttcattaaacaagaccagttctccctcttccccctgtcccaagaaatcttaggcatgaaaaggataaggaaacagctcctggaatgatacatttgcatagtgccctagtagcaggttgggaaaaagttataatataagaaacaaccttcgaaaacaggccttttatctcaaagataaaatgtctttcttgtggtctttcatcactatctccgtggtggaaggttcccctagttccaacatatttccattaaaatagtcaaagccacggcattgggatgtcagatgcctctctttctttgtggtaatcggaatttaaaattatacagttgcctctgaatttctcatgcacaaagccaaaccactgataagagataaagcagtctgaagcctgctgcttcagccagcacagcacaccacacacgctcgcactttcaaaagcaatgtgatttctatggttcttaaaagctttcttcataagggagtccctgaaatttctcaaggcaggtttgaatggcaaagggaaaataattacttgtgggaggtcctccttttgagtattgttagagcatacatgtaaaagaaaataacctttttggggcaactcatgctcacacatgctgttttctttggttctccccctaccttccttttgtagatattgacagaataggaggaaatgagcatccttatttgagaaagagcaagaatgtcatgagcccttgatgcaatagtaagtgtgatgtcatcatacagtgttaatgatgctatcaaatccatcaataaacagtctcaaaccttccaacaacagtgctcactgctgctcctcaacttcagcccagcaagcagtaatatcatcacccattttgagatatgcaggtggaatagaacaaagaaacagccactgtaatcgagaagcatgtttactgtctaaatccacctgttgcagtaggaagccagagtggggttccaaatgcctcattaagtatgtggacagcctcactagtaagtgagtgaatttggcttcatcactgaacattagctaaggtcagcttaataacacaaatatgaggccgacttctttgcgagaagagaaaagaaaacatctgcttgatttaaaatccaccccacatgcctagagttgtctaatagtccctcactttccaatggcttcacatcctacttctacatttggggttttttggtgaaatcagagatagctcaggatttcataaaacgagaaactccaaactggtctattaggttccatgggaacacttgtagccaaaggattgtctgagggcaggaagacgacacttgtcaacaaggaagacagtgtttctttagttcccatattcatctaattcatggggttctaacattttggggggccatagattcttttgacaatctgagccaatctatgaaacttctccccaaaaagaaccaccccacaaaatcttgcaaaacgtaagagattttcctggatctgaagctacccgaagacatgggaagagttgtattctattattcaattttaagaatatttattaatattcactgagctattgctagccactgtgctaaacattttacatacattctcctatttcatcctcaaaacaatcctttgagttgggttttaatatagttccaatattcggatgtgaaaactgaggcttatagtggctaagaaacttgcccaaagccactacctagaaaatggcagagctggaatgtaggtttaactcctgaccactatgctataaagtcaccacatgtcaaactaattttcaagttgttgggacatgtcccctactaggttttaaactagatcttccttggtagatgaagctatagaacttctattttccctgctttctgtagtctctcacagtgacagcatctatactaaagtatagatacctaaggggaaaatatagaaagcctgcctgaataatagaatctagaacaacaacaaaaatattaattttttctgtgtatgcttaggtcaagcttaaaaaaaaaaaaaaaagaccggaaaatacctgggttgttagcctcacatttaggaaaaaattgtaatactcagttatctgtgtgtgtggctaaacaagtcagcatttctgcacacatacatctctttcctttatacttcccttcaaaagacaaatatcttacttttgatctttgacactatttggtcagtattcttctttacctttacttgtggcaaaactcaaggaagcgatcaaatagagggaagctcatttctatcattgtctctgtttccctataagaaagaactaccagggactcactgactgcattaggcatacaatgtcagagctgagctgaccactctggtcctgtaatgtctttggcctcacaccttggcagccatcattaatgggccatacccttccccaggtgcagaattctcctccccagagcactcaggccgttactaccaatttatctgagttggaaataagactcatttgccagttcttatttttaaagtggcaccctttaactttgaacctgtgtattttacactggcatcctagattcagcaatgaggtttggtggtgtttcaactaggaagggagaaaatgagtgcatctgaagttccttacagcttggtttctttggaatgctttcatcttctaagcaaagggatcagggtttgatctgtaagagttaaaaagacaaagtcattttgaagaattaactcagccagggatcatgcaaaaagattagaaaccataatgcccttgttaaagccctgctgtcaacctgccttcacccagagcttagagggccacagcagcaaagaggttggggtccatccctctctgatgtgctttttccacaacacatatctggtcctctggcaggattgtggatagagctcctcaccatacccaaaagactcagccccagtgccagtgctttcctggttcaacaacccaccacaaaaccttagtaaaaggatgagccaaaaatgaaaaagactcgactctacagtaagtcagtcagggatttcctttttaatggtttaagacatccaaatggcaagccaggaatagataccattaaagggtctcataggactaaccttaccagagccagaaatctagctctctggaagagatgcaagattctagaaaagtaaagggaagtgtcggcacatctaaatttagtgaacacaaaattaatttttatctagtctgtgacggagggaataaagtttttcatgtatcaaccacctcccccagtcaggtttctccctttttgagattatgaagaagctgagacatacttcttaaggaggtcgtgttttagaaggaaaaggcagaggctatccatcattatgctggctagatgcgcttctgaagaagccggattctgatgttcttaaccaaaatggtgaggtcatggaagtcccatttgcttggagattttgaaaaaaaaaaaaaaaaaaaacccattcccataaagtaattgagttcagcctttggattatttttggtttggtttttctctggttttgggtgtgatgtaagaagagctttttagttttgttttgaataacatcaatccttgcacactctatgcaaaaattttgtaagcatttcaataatgctatgaattacaaggaactattttaactttattacactttctgtataaaaaatttgtatttaatattatttcgaccacagtcttgtaaaatatattaataaaaataatgattggtaagaaggaaa

SEQ ID NO: 527 - protein, 54 aa, Artificial Sequence
  Description of Artificial Sequence: Synthetic polypeptide
  truncated I-1c (1-54;T35D)
MEQDNSPQKIQFTVPLLEPHLDPEAAEQIRRRRPDPATLVLTSDQSSPEIDEDR

SEQ ID NO: 528 - protein, 61 aa, Artificial Sequence
  Description of Artificial Sequence: Synthetic polypeptide
  truncated I-1c (1-61;T35D)
MEQDNSPQKIQFTVPLLEPHLDPEAAEQIRRRRPDPATLVLTSDQSSPEIDEDRIPNPHLK

SEQ ID NO: 529 - protein, 66 aa, Artificial Sequence
  Description of Artificial Sequence: Synthetic polypeptide
  truncated I-1c (1-66;T35D)
MEQDNSPQKIQFTVPLLEPHLDPEAAEQIRRRRPDPATLVLTSDQSSPEIDEDRIPNPHLKSTLAM

SEQ ID NO: 530 - protein, 67 aa, Artificial Sequence
  Description of Artificial Sequence: Synthetic polypeptide
  truncated I-1c (1-67;T35D)
MEQDNSPQKIQFTVPLLEPHLDPEAAEQIRRRRPDPATLVLTSDQSSPEIDEDRIPNPHLKSTLAMS

SEQ ID NO: 531 - protein, 70 aa, Artificial Sequence
  Description of Artificial Sequence: Synthetic polypeptide
  truncated I-1c (1-70;T35D)
MEQDNSPQKIQFTVPLLEPHLDPEAAEQIRRRRPDPATLVLTSDQSSPEIDEDRIPNPHLKSTLAMSPRQ

SEQ ID NO: 532 - protein, 77 aa, Artificial Sequence
  Description of Artificial Sequence: Synthetic polypeptide
  truncated I-1c (1-77;T35D)
MEQDNSPQKIQFTVPLLEPHLDPEAAEQIRRRRPDPATLVLTSDQSSPEIDEDRIPNPHLKSTLAMSPRQRKKMTRI

1. A method of treating a patient having a heart failure, comprising:
administering into heart cells of the patient having a classification of congestive heart failure (CHF), at least one total dose of a rAAV vector comprising a nucleic acid sequence encoding a phosphatase inhibitor (I-1) protein that inhibits phosphatase activity,
wherein, at least one dose of the rAAV is selected from a total dose-range of about 10¹³ vg to about 10¹⁵ vg, and
wherein, at least twelve months post-administration there is an improvement in the classification of congestive heart failure.

2. The method of claim 1, wherein the classification is based upon a classification system used by the American Heart Association (AHA), the American College of Cardiology (ACC), Minnesota LIVING WITH HEART FAILURE® Questionnaire (MLHFQ), Kansas City Cardiomyopathy questionnaire (KCCQ), or the 2016 European Society of Cardiology guidelines (ESCG), the Japanese heart failure Society (JHFS) guidelines, The Japanese Circulation Society (JCS) Guidelines, or, the New York Heart Association (NYHA).

3. The method of claim 1 or 2, wherein there is an improvement in the classification of at least one level 12 months after administration of the rAAV.

4. The method of claim 1 or 2, wherein there is an improvement in the classification of at least one level within six months after administration of the rAAV.

5. The method of claim 1, wherein twelve months post-administration there is an improvement of at least 2 levels in the Classification.

6. The method of any of claims 1-5, wherein the classification system is NYHA and the level of classification is selected from the group consisting of: Class I, Class II, Class III, and Class IV.

7. The method of any of claims 1-5, wherein the classification system is the American College of Cardiology/American Heart Association (ACC/AHA) complementary staging system and the level of classification is selected from the group consisting of: Stages A, Stage B, Stage C, Stage D.

8. The method of any of claims 1-5, wherein the classification system is KCCQ and the level of classification is a KQQC overall summary score range selected from the group consisting of: KCCQ fair to excellent scores of 50 to 100, very poor to fair scores of 0 to 49, good to excellent scores of 75 to 100, and very poor to good scores of 0 to 74.

9. A method of treating a patient having cardiomyopathy, comprising:
administering into heart cells of the patient at least one total dose of a rAAV vector comprising a nucleic acid sequence encoding a phosphatase inhibitor (I-1) protein that inhibits phosphatase activity,
wherein, at least one dose of the rAAV is selected from a total dose-range of about 10¹³ vg to about 10¹⁵ vg, and
wherein, at least twelve months post-administration there is an improvement in the at least one parameter from a baseline level in the patient, where the at least one parameter is selected from the group consisting essentially of:
a. ejection fraction (EF),
b. end systolic volume (ESV)
c. cardiac contractility, selected from ejection fraction (EF) and fractional shortening (FS)
d. cardiac volumes selected from any of: end diastolic volume (DV) and end systolic volume (ESV),
e. functional criteria, selected from any of: a 6-minute walk test (6MWT), exercise and VO2max;
f. BNP level,
g. Pro-BNP level
h. biomarker level, wherein the biomarker level is selected from the group of: troponin, serum creatinine, cystatin-C, or hepatic transaminases,
i. Patient-reported outcomes (PROs), such as reduced symptoms, health-related quality of life (HRQOL), or patient perceived health status, and
j. decrease in any of: mortality risk due to heart failure, reduced hospitalization due to heart failure symptoms, or therapeutic intervention for treatment of heart failure.

10. The method of claim 9, wherein there is an improvement of at least 2 parameters at least 12 months after administration.

11. The method of claim 10, wherein there is an improvement of at least 3 parameters at least 12 months after administration.

12. The method of claim 11, wherein there is an improvement of at least 4 parameters at least 12 months after administration.

13. The method of claim 12, wherein there is an improvement of at least 5 parameters at least 12 months after administration.

14. The method of claim 9, wherein the improvement is selected from any of:
a. at least a 5% or more increase in ejection fraction from baseline,
b. at least a 10% decrease, or at least a 20 ml decrease in end systolic volume from baseline,
c. at least a 50-meter increase in 6-minute walk test from baseline,
d. at least a 40% decrease in BNP levels (pg/ml) in the blood from baseline,
e. at least a 35% decrease in pro-BNP levels (pg/ml) in the blood from baseline,
f. at least a 10% reduction in a biomarker selected from: troponin, serum creatinine, cystatin-C, or hepatic transaminases from a baseline level of the same biomarker,
g. at least a 1.5 ml/kg/min increase in myocardial oxygen consumption (MVO2) from baseline,or
h. a discharge from hospital due to improved HF symptoms, or a reduced intervention selected from a decrease in the use of any of: inotropes, vasodilators, diuretcis due to improved HF symptoms in the subject.

15. The method of claim 1 or 14, wherein the rAAV vector further comprises CMV promoter or a synthetic promoter, operatively linked to the phosphatase inhibitor protein.

16. The method of any of claims 1-15, wherein the total dose is administered as any of the following administration methods:
a. over a period of time of about 20 minutes to about 30 minutes,
b. administered in a series of sub-doses, wherein each sub-dose is administered over a period of time of about 1 minute to about 5 minutes,
c. administered in a series of five sub-doses, each sub-dose is administered over a period of time of about 1 minute to about 5 minutes, and wherein the five sub-doses are administered over a period of about 20 minutes to about 30 minutes.

17. The method of any of claims 1-16, wherein there rAAV vector comprises a capsid that detargets the liver.

18. The method of any of claims 1-17, wherein the rAAV is selected from the group consisting of AAV1, AAV2, AAV6, AAV8, AAV9, AAV2i8, rh10, AAV2.5 and AAV2G9.

19. The method of any of claims 1-18, wherein the rAAV vector is AAV2i8.

20. The method of any of claim 1-19, wherein at least one total dose of the rAAV is 10¹³ vg, 3X10¹³ vg, 10¹⁴ vg, 3X10¹⁴ vg, or, 10¹⁵ vg.

21. The method of any of claims 1-20, wherein the phosphatase inhibitor (I-1) protein is a constitutively active protein (I-1c).

22. The method of claim 21, wherein the s I-1c is selected from any of:
a. a polypeptide comprises at least amino acid residues 1-54 of SEQ ID NO: 1, wherein SEQ ID NO: 1 is truncated at the C-terminus at amino acid 70, 67, 66, 65, or 61, or 54, and where the there is an aspartic acid at position 35 (T35D),
b. a polypeptide comprising amino acids 1-54 of SEQ ID NO:1 or a functional fragment thereof, wherein the functional fragment has at least 85% sequence identity to amino acid residues 1-54 of SEQ ID NO: 1, or truncated at the C-terminus at amino acid 70, 67, 66, 65, or 61, or 54, and where the there is an aspartic acid at position 35 (T35D).

23. The method of any of claims 1-22, wherein the rAAV genome comprises nucleic acid sequence selected from the group consisting of: SEQ ID NO: 413-441.

24. The method of claim 21, wherein the nucleic acid sequence encoding the I-1 polypeptide is selected from
a. a nucleic acid sequence encoding a polypeptide comprising amino acids 1-65 of SEQ ID NO: 1, wherein threonine (T) at position 35 of SEQ ID NO: 1 is replaced with an amino acid that is not T,
b. a nucleic acid sequence encoding a polypeptide comprising amino acids 1-65 of SEQ ID NO: 1, wherein threonine (T) at position 35 of SEQ ID NO: 1 is replaced with an acid amino acid selected from any of: aspartic acid (D), glutamic acid (E), asparagine (N), glutamine (Q),
c. a nucleic acid sequence encoding a polypeptide comprising amino acids 1-65 of SEQ ID NO: 1, wherein threonine (T) at position 35 of SEQ ID NO: 1 is replaced with aspartic acid (D), or a conservative amino acid of aspartic acid.

25. The method of any of claims 1-24, wherein the nucleic acid sequence encoding the I-1 protein is a codon optimized nucleic acid sequence.

26. The method of any of claims 1-25, wherein the nucleic acid sequence encoding the I-1 protein is selected from any of SEQ ID NO: 385-412, or a nucleic acid sequence having at least 80% sequence identity to SEQ ID NO: 385-412.

27. The method of any of claims 1-26, wherein the subject with cardiomyopathy has non-ischemic heart failure and/or non-ischemic cardiomyopathy.

28. The method of any of claims 1-27, wherein the subject with cardiomyopathy has a congenital cardiomyopathy or a genetic disorder with a cardiac manifestation.

29. The method of claim 29, wherein the subject with a congenital cardiomyopathy or a genetic disorder with a cardiac manifestation has a disease or disorder selected from the group consisting of:
Arrhythmogenic right ventricular cardiomyopathy, Atrial myxoma, familial, Atrial septal defect ostium primum, Atrial septal defect sinus venosus, Barth syndrome, muscular dystrophy, Buerger disease, Cardioencephalomyopathy, Chromosome 1p36 deletion syndrome, Congenital generalized lipodystrophy type 4, Congenital heart block, Dilated cardiomyopathy, Duchenne muscular dystrophy (DMD), Fabry disease, Familial atrial fibrillation, Familial dilated cardiomyopathy, Familial hypertrophic cardiomyopathy, Familial progressive cardiac conduction defect, Familial thoracic aortic aneurysm and aortic dissection, Fibromuscular dysplasia, Friedreich ataxia, Gaucher disease, Glycogen storage disease (types 2, 3 or 4), His bundle tachycardia, Hurler syndrome, Hypoplastic left heart syndrome, Infantile histiocytoid cardiomyopathy, Intracranial arteriovenous malformation, Isobutyryl-CoA dehydrogenase deficiency, Kallikrein hypertension, Kawasaki disease, Kearns-Sayre syndrome, Left ventricular noncompaction, Limb-girdle muscular dystrophy (types 1B, 2E, 2F, 2M, 2C, 2D), Limited systemic sclerosis, Long QT syndrome 1, Lymphedema and cerebral arteriovenous anomaly, Lymphocytic vasculitis, Microcephaly-cardiomyopathy; Mitochondrial encephalomyopathy lactic acidosis and stroke-like episodes, Mitochondrial trifunctional protein deficiency, Myotonic dystrophy type 1, Neonatal stroke, Noonan syndromes 1 -, 2-, 3-, 4-, 5- and 6, Peripartum cardiomyopathy, Peters plus syndrome, PGM1-CDG, PHACE syndrome, Phospholamban Arg 14 Deletion, Postural orthostatic tachycardia syndrome, Primary carnitine deficiency, Progressive familial heart block (types 1A, 1B and 2), Pseudohypoaldosteronism type 2, Pulmonary arterial hypertension, Pulmonary atresia with intact ventricular septum, Pulmonary atresia with ventricular septal defect, Pulmonary valve stenosis, Pulmonary vein stenosis, Pulmonic stenosis, Renoprival hypertension, Retinal arterial macroaneurysm with supravalvular pulmonic stenosis, Right ventricle hypoplasia, Sarcoidosis, Sengers syndrome, Situs inversus, Sudden Arrhythmia Death Syndrome, Supravalvular aortic stenosis, Swyer syndrome, TANGO2-Related Metabolic Encephalopathy and Arrhythmias, TARP syndrome, Tetralogy of Fallot, Timothy syndrome, Tricuspid atresia, Vici syndrome, VLCAD deficiency and Williams syndrome.

30. The method of any of claims 1-29, wherein the subject with cardiomyopathy has an ischemic cardiomyopathy.

31. The method of any of claims 1-30, wherein the subject with cardiomyopathy has heart failure.

32. The method of claim 31, wherein the subject with heart failure has a classification that is equivalent to class III or above in the New York Heart Association (NYHA) classification system.

33. The method of any of claims 30-32, wherein the subject with heart failure has a cardiovascular disease or heart disease is selected from any of: congestive heart failure (CHF), left ventricular remodeling, peripheral arterial occlusive disease (PAOD), dilated cardiomyopathy (DCM) including idiopathic dilated cardiomyopathy (IDCM), coronary artery disease, ischemia, arrhythmia, myocardial infarction (MI), abnormal heart contractility, acute (decompensated) heart failure (AHF), abnormal Ca2+ metabolism, myocardial ischemia, atherosclerosis, cardiomyopathy, idiopathic cardiomyopathy, genetic disorder induced cardiomyopathy, cardiac arrhythmias, muscular dystrophy, muscle mass abnormality, muscle degeneration, infective myocarditis, drug- or toxin-induced muscle abnormalities, hypersensitivity myocarditis, an autoimmune endocarditis and congenital heart disease and pulmonary heart hypertension.

34. The method of any of claims 1-33, wherein the subject with cardiomyopathy has reduced ejection fraction (rEF or HFrEF), or, preserved ejection fraction (HFpEF).

35. The method of any of claims 1-34, wherein at least twelve months post-administration of the rAAV there is an improvement of at least one class in a classification of heart failure from a baseline level, wherein the classification of heart failure is assessed by at least one of the following:
a. a classification system used by the American Heart Association (AHA), the American College of Cardiology (ACC), the 2016 European Society of Cardiology guidelines (ESCG), the Japanese heart failure Society (JHFS) guidelines, The Japanese Circulation Society (JCS) Guidelines, or, the New York Heart Association (NYHA); or equivalent thereof, or
b. a health-related quality of life (HRQL) questionnaire selected from the group consisting from any of: Minnesota LIVING WITH HEART FAILURE® Questionnaire (MLHFQ), or Kansas City Cardiomyopathy questionnaire (KCCQ), Chronic Heart Failure Questionnaire (CHFQ), Quality of Life Questionnaire for Severe Heart Failure (QLQ-SHF), Left Ventricular Dysfunction (LVD-36) questionnaire, and the Left Ventricular Disease Questionnaire (LVDQ).

36. The method of claim 35, wherein there is an improvement in the classification of at least one level within six months after administration of the rAAV.

37. The method of claim 35, wherein there is an improvement in the classification of at least two levels within twelve months after administration of the rAAV.

38. The method of claim 35, wherein there is an improvement of at least a 10 point decrease in quality of life MLWHFQ or KCCQ from the baseline level.

39. The method of any of claims 1-38, wherein the subject is administered a vasodilator concurrent with and/or, before, and/or, after the administration of the at least one total dose of a rAAV vector.

40. The method of any of claims 1-39, wherein the subject is administered an immune modulator concurrent with, or before, or after the administration of the at least one total dose of a rAAV vector.

41. A pharmaceutical composition comprising an AAV vector that comprises a codon optimized I-Ic nucleic sequence selected from any of SEQ ID NO: 385-412, or nucleic acid sequence having at least 80% sequence identity to SEQ ID NOS: 385-412.

42. The pharmaceutical composition of claim 41, wherein the codon optimized nucleic acid sequence is operably linked to a CMV promoter or a synthetic promoter.

43. The pharmaceutical composition of claim 41, comprising a nucleic acid sequence selected from the group consisting of: SEQ ID NO: 41-42, or a nucleic acid sequence having at least 80% sequence identity to SEQ ID NOS: 385-412.

44. The pharmaceutical composition of any of claims 41-43, for the use in a method according to any of claims 1-40.

45. An adeno-associated virus (AAV) vector comprising a nucleic acid sequence encoding a Phosphatase inhibitor (I-1) polypeptide operably linked to a promoter selected from any of:
a cardiac-specific promoter selected from Table 2A or a variant thereof,
a muscle-specific promoter active in cardiac and skeletal muscle, or a variant thereof, or
any promoter when a cardiac tissue specific enhancer is present.

46. The AAV vector of claim 45, wherein muscle-specific promoter active in cardiac and skeletal muscle is selected from Table 5A or Table 13A or a variant thereof.

47. The AAV vector of any of claims 45-46, wherein the AAV is selected from the group consisting of adeno-associated virus-1 (AAV1), AAV2, AAV3, AAV4, AAV5, AAV6, AAV7, AAV8, AAV9 and AAV2i8.

48. The AAV vector of any of claims 45-47, wherein the AAV comprises a capsid that detargets the liver.

49. The AAV vector of any of claim 45-48, wherein the AAV is AAV2i8.

50. The AAV vector of any of claims 45-49, wherein the phosphatase inhibitor (I-1) polypeptide is a constitutively active protein (I-1c).

51. The AAV vector of any of claims 45-50, wherein the I-1c is selected from any of:
a. a polypeptide comprises at least amino acid residues 1-65 of SEQ ID NO: 1 or a functional equivalent thereof;
b. a polypeptide comprising at least amino acids 1-54 of SEQ ID NO: 1, wherein the polypeptide is truncated at a C-terminus at amino acid selected from residue 70, 67, 66, 65, or 61, or 54, and where the there is an aspartic acid at position 35 (T35D),
c. a polypeptide comprising amino acids 1-65 of SEQ ID NO:1 or a functional equivalent thereof having at least 85% sequence identity to amino acid residues 1-65 of SEQ ID NO: 1, or,
d. a polypeptide selected from any of: SEQ ID NOS: 507 or 527-532 or a functional equivalent thereof having at least 85% sequence identity to amino acid residues of any of SEQ ID NOS: 507 or 527-532.

52. The AAV vector of any of claims 45-51, wherein the nucleic acid sequence encoding a I-1 polypeptide is selected from:
a. a nucleic acid sequence encoding a polypeptide comprising amino acids 1-65 of SEQ ID NO: 1, wherein threonine (T) at position 35 of SEQ ID NO: 1 is replaced with an amino acid that is not T,
b. a nucleic acid sequence encoding a polypeptide comprising amino acids 1-65 of SEQ ID NO: 1, wherein threonine (T) at position 35 of SEQ ID NO: 1 is replaced with an acid amino acid selected from any of: aspartic acid (D), glutamic acid (E), asparagine (N), glutamine (Q),
c. a nucleic acid sequence encoding a polypeptide comprising amino acids 1-65 of SEQ ID NO: 1, wherein threonine (T) at position 35 of SEQ ID NO: 1 is replaced with aspartic acid (D), or a conservative amino acid of aspartic acid.

53. The AAV vector of any of claims 45-52, wherein the polypeptide is selected from: amino acids 1-54 of SEQ ID NO: 1, amino acids 1-61 of SEQ ID NO: 1, amino acids 1-65 of SEQ ID NO: 1, amino acids 1-66 of SEQ ID NO: 1, amino acids 1-67 of SEQ ID NO: amino acids 1 or 1-77 of SEQ ID NO: 2, or a functional variant thereof, wherein the threonine at position 35 of SEQ ID NO: 1 is replaced with an aspartate acid (T35D), or a conservative amino acid of aspartate.

54. The AAV vector of any of claims 45-50, wherein the nucleic acid sequence encoding the I-1 polypeptide is a codon optimized nucleic acid sequence.

55. The AAV vector of any of claims 45-54, wherein the codon optimized nucleic acid sequence has reduced CpG content or reduced CpG islands as compared to the wild-type reference sequence of a SEQ ID NO: 1, or a fragment thereof.

56. The AAV vector of any of claims 45-54, wherein the nucleic acid sequence encoding the I-1 polypeptide is a codon optimized nucleic acid sequence selected from any of: SEQ ID NO: 385-412 or a nucleic acid sequence at least 80% sequence identity to SEQ ID NO: 385-412.

57. The AAV vector of any of claim 45-56, further comprising at least one ITR located 5′ of the nucleic acid sequence encoding a Phosphatase inhibitor (I-1) polypeptide operably linked to the cardiac-specific promoter or muscle-specific promoter.

58. The AAV vector of any of claim 45-57, further comprising at least two ITRs flanking the nucleic acid sequence encoding a Phosphatase inhibitor (I-1) polypeptide operably linked to the cardiac-specific promoter or muscle-specific promoter.

59. The AAV vector of any of claim 45-58, wherein the ITR sequences are selected from any one or more of: SEQ ID NO: 70-78, or a nucleic acid having at least 85% sequence identity to SEQ ID NO: 70-78.

60. The AAV vector of any of claims 45-59, further comprising a reverse poly A sequence or double stranded RNA termination element, wherein the reverse polyA sequence or double stranded termination element are located 3′ of the nucleic acid sequence encoding a Phosphatase inhibitor (I-1) polypeptide.

61. The AAV vector of claim 60, wherein the reverse poly A sequence, or double stranded RNA termination element is located between 3′ of the nucleic acid sequence encoding a Phosphatase inhibitor (I-1) polypeptide and 5′ of the right ITR.

62. The AAV vector of any of claims 45-61, wherein the nucleic acid sequence can further comprise a nucleic acid sequence encoding at least one immune modulator.

63. The AAV vector of any of claims 45-61, present in a composition or solution, further comprising an immune modulator.

64. The AAV vector of any of claims 45-63, further comprising a polyA sequence selected from any of SV40 polyA (SEQ ID NO: 334), HGH poly A (SEQ ID NO: 66), SEQ ID NO: 284-287, SEQ ID NO 331-335, wherein the polyA sequence is located 3′ of the nucleic acid sequence encoding a Phosphatase inhibitor (I-1) polypeptide.

65. A pharmaceutical composition comprising:
(i) adeno-associated virus (AAV) vector comprising a nucleic acid sequence encoding a Phosphatase inhibitor (I-1) polypeptide operably linked to any one of:
a. a cardiac-specific promoter selected from Table 2A or a variant thereof,
b. a muscle-specific promoter active in cardiac and skeletal muscle, or
c. any promoter when a cardiac tissue specific enhancer is present, or a variant thereof; and
(ii) a pharmaceutically acceptable carrier.

66. The pharmaceutical composition of claim 65, wherein muscle-specific promoter active in cardiac and skeletal muscle is selected from Table 5A or Table 13A or a variant thereof.

67. The pharmaceutical composition of claims 65-66, wherein the AAV is selected from the group consisting of adeno-associated virus-1 (AAV1), AAV2, AAV3, AAV4, AAV5, AAV6, AAV7, AAV8, AAV9 and AAV2i8.

68. The pharmaceutical composition of claims 65-67, wherein the AAV comprises a capsid that detargets the liver.

69. The pharmaceutical composition of any of claims 65-68, wherein the AAV is AAV2i8.

70. The pharmaceutical composition of any of claims 65-69, wherein the AAV comprises a nucleic acid selected from the group consisting of SEQ ID NO: 413-440, or a nucleic acid sequence at least 80% sequence identity to a sequence selected from SEQ ID NO: 413-440, wherein the nucleic acids seet forth in SEQ ID NO: 413-440 comprise a CMV promoter of SEQ ID NO: 330, wherein the CMV promoter of SEQ ID NO: 330 is replaced by any of:
a. a cardiac-specific promoter selected from Table 2A or a variant thereof,
b. a muscle-specific promoter active in cardiac and skeletal muscle, or
c any promoter when a cardiac tissue specific enhancer is present, or a variant thereof.

71. The pharmaceutical composition of any of claims 64-69, further comprises a vasodilator.

72. The pharmaceutical composition of any of claims 64-69, further comprises an immune modulator.

73. The pharmaceutical composition of claim 65, wherein the phosphatase inhibitor (I-1) polypeptide is a constitutively active protein (I-1c).

74. The pharmaceutical composition of claim 73, wherein the 1-1c is selected from any of:
a. a polypeptide comprises at least amino acid residues 1-65 of SEQ ID NO: 1 or a functional equivalent thereof;
b. a polypeptide comprising at least amino acids 1-54 of SEQ ID NO: 1, wherein the polypeptide is truncated at the C-terminus at amino acid 70, 67, 66, 65, or 61, or 54, and where the there is an aspartic acid at position 35 (T35D),
c. a polypeptide comprising amino acids 1-65 of SEQ ID NO:1 or a functional equivalent thereof having at least 85% sequence identity to amino acid residues 1-65 of SEQ ID NO: 1, or
d. a polypeptide selected from any of: SEQ ID NOS: 507 or 527-532 or a functional equivalent thereof having at least 85% sequence identity to amino acid residues of any of SEQ ID NOS: 507 or 527-532.

75. The pharmaceutical composition of any of claims 65-74, wherein the nucleic acid sequence encoding a I-1 polypeptide is selected from:
a. a nucleic acid sequence encoding a polypeptide comprising amino acids 1-65 of SEQ ID NO: 1, wherein threonine (T) at position 35 of SEQ ID NO: 1 is replaced with an amino acid that is not T,
b. a nucleic acid sequence encoding a polypeptide comprising amino acids 1-65 of SEQ ID NO: 1, wherein threonine (T) at position 35 of SEQ ID NO: 1 is replaced with an acid amino acid selected from any of: aspartic acid (D), glutamic acid (E), asparagine (N), glutamine (Q),
c. a nucleic acid sequence encoding a polypeptide comprising amino acids 1-65 of SEQ ID NO: 1, wherein threonine (T) at position 35 of SEQ ID NO: 1 is replaced with aspartic acid (D), or a conservative amino acid of aspartic acid.

76. The pharmaceutical composition of any of claims 65-745, wherein the nucleic acid sequence encoding the I-1 protein is a codon optimized nucleic acid sequence.

77. The pharmaceutical composition of claim 76, wherein the codon optimized nucleic acid sequence has reduced CpG content as compared to a reference wild type sequence.

78. The pharmaceutical composition of any of claims 65-77, wherein the codon optimized nucleic acid sequence encoding the I-1 polypeptide is selected from any of SEQ ID NO: 385-412, or a nucleic acid sequence having at least 80% sequence identity to a sequence selected from any of SEQ ID NOS: 385-412.

79. Use of an AAV vector according to any one of claims 45-64, for the manufacturer of a pharmaceutical composition for the treatment of a subject having cardiomyopathy.

80. The use of the AAV vector of claim 79, wherein the subject with cardiomyopathy has non-ischemic heart failure and/or non-ischemic cardiomyopathy.

81. The use of the AAV vector of claim 79, wherein the subject with cardiomyopathy has a congenital cardiomyopathy or a genetic disorder with a cardiac manifestation.

82. The use of the AAV vector of claim 80, wherein the subject with a congenital cardiomyopathy or a genetic disorder with a cardiac manifestation has a disease or disorder selected from the group consisting of: Arrhythmogenic right ventricular cardiomyopathy, Atrial myxoma, familial, Atrial septal defect ostium primum, Atrial septal defect sinus venosus, Barth syndrome, muscular dystrophy, Buerger disease, Cardioencephalomyopathy, Chromosome 1p36 deletion syndrome, Congenital generalized lipodystrophy type 4, Congenital heart block, Dilated cardiomyopathy, Duchenne muscular dystrophy (DMD), Fabry disease, Familial atrial fibrillation, Familial dilated cardiomyopathy, Familial hypertrophic cardiomyopathy, Familial progressive cardiac conduction defect, Familial thoracic aortic aneurysm and aortic dissection, Fibromuscular dysplasia, Friedreich ataxia, Gaucher disease, Glycogen storage disease (types 2, 3 or 4), His bundle tachycardia, Hurler syndrome, Hypoplastic left heart syndrome, Infantile histiocytoid cardiomyopathy, Intracranial arteriovenous malformation, Isobutyryl-CoA dehydrogenase deficiency, Kallikrein hypertension, Kawasaki disease, Kearns-Sayre syndrome, Left ventricular noncompaction, Limb-girdle muscular dystrophy (types 1B, 2E, 2F, 2M, 2C, 2D), Limited systemic sclerosis, Long QT syndrome 1, Lymphedema and cerebral arteriovenous anomaly, Lymphocytic vasculitis, Microcephaly-cardiomyopathy; Mitochondrial encephalomyopathy lactic acidosis and stroke-like episodes, Mitochondrial trifunctional protein deficiency, Myotonic dystrophy type 1, Neonatal stroke, Noonan syndromes 1 -, 2-, 3-, 4-, 5- and 6, Peripartum cardiomyopathy, Peters plus syndrome, PGM1-CDG, PHACE syndrome, Phospholamban Arg 14 Deletion, Postural orthostatic tachycardia syndrome, Primary carnitine deficiency, Progressive familial heart block (types 1A, 1B and 2), Pseudohypoaldosteronism type 2, Pulmonary arterial hypertension, Pulmonary atresia with intact ventricular septum, Pulmonary atresia with ventricular septal defect, Pulmonary valve stenosis, Pulmonary vein stenosis, Pulmonic stenosis, Renoprival hypertension, Retinal arterial macroaneurysm with supravalvular pulmonic stenosis, Right ventricle hypoplasia, Sarcoidosis, Sengers syndrome, Situs inversus, Sudden Arrhythmia Death Syndrome, Supravalvular aortic stenosis, Swyer syndrome, TANGO2-Related Metabolic Encephalopathy and Arrhythmias, TARP syndrome, Tetralogy of Fallot, Timothy syndrome, Tricuspid atresia, Vici syndrome, VLCAD deficiency and Williams syndrome.

83. The use of the AAV vector of claim 79, wherein the subject with cardiomyopathy has an ischemic cardiomyopathy.

84. The use of the AAV vector of claim 79, wherein the subject with cardiomyopathy has heart failure.

85. The use of the AAV vector of claim 84, wherein the subject with heart failure has a classification of heart failure based upon a classification system used by the American Heart Association (AHA), the American College of Cardiology (ACC) or the New York Heart Association (NYHA).

86. The use of the AAV vector of claim 85, wherein the subject with heart failure has a classification of a class III or above class III in the New York Heart Association (NYHA) classification system.

87. Use of an AAV vector according to any one of claims 45-64, for the manufacturer of a pharmaceutical composition for the treatment of a subject having a condition or disease associated with heart failure.

88. The use of claim 87, wherein the subject has a classification of congestive heart failure (CHF).

89. The use of claim 87, wherein the classification is based upon a classification system used by the American Heart Association (AHA), the American College of Cardiology (ACC) or the New York Heart Association (NYHA).

90. The use of claim 87, wherein the subject has non-ischemic heart failure or non-ischemic cardiomyopathy.

91. The use of claim 87, wherein the subject has ischemic heart failure or ischemic cardiomyopathy.

92. The use of any of claims 79 or 87, wherein the subject has reduced ejection fraction (rEF or HFrEF).

93. A cell comprising the AAV vector of any of claims 45-64.

94. The cell of claim 93, wherein the cell is a cardiac cell or muscle cells.

95. The cell of any of claims 93-94, wherein the cell is in cell culture or a cell present in a subject.

96. An AAV vector according to claims 45-64, a pharmaceutical formulation of any of claims 65-78, or a cell according any of claims 93-95 for use in the treatment of a subject having cardiomyopathy.

97. The AAV vector of claim 96, wherein the subject with cardiomyopathy has non-ischemic heart failure and/or non-ischemic cardiomyopathy.

98. The AAV vector of claim 96, wherein the subject with cardiomyopathy has a congenital cardiomyopathy or a genetic disorder with a cardiac manifestation.

99. The AAV vector of claim 98, wherein the subject with a congenital cardiomyopathy or a genetic disorder with a cardiac manifestation has a disease or disorder selected from the group consisting of:
Arrhythmogenic right ventricular cardiomyopathy, Atrial myxoma, familial, Atrial septal defect ostium primum, Atrial septal defect sinus venosus, Barth syndrome, muscular dystrophy, Buerger disease, Cardioencephalomyopathy, Chromosome 1p36 deletion syndrome, Congenital generalized lipodystrophy type 4, Congenital heart block, Dilated cardiomyopathy, Duchenne muscular dystrophy (DMD), Fabry disease, Familial atrial fibrillation, Familial dilated cardiomyopathy, Familial hypertrophic cardiomyopathy, Familial progressive cardiac conduction defect, Familial thoracic aortic aneurysm and aortic dissection, Fibromuscular dysplasia, Friedreich ataxia, Gaucher disease, Glycogen storage disease (types 2, 3 or 4), His bundle tachycardia, Hurler syndrome, Hypoplastic left heart syndrome, Infantile histiocytoid cardiomyopathy, Intracranial arteriovenous malformation, Isobutyryl-CoA dehydrogenase deficiency, Kallikrein hypertension, Kawasaki disease, Kearns-Sayre syndrome, Left ventricular noncompaction, Limb-girdle muscular dystrophy (types 1B, 2E, 2F, 2M, 2C, 2D), Limited systemic sclerosis, Long QT syndrome 1, Lymphedema and cerebral arteriovenous anomaly, Lymphocytic vasculitis, Microcephaly-cardiomyopathy; Mitochondrial encephalomyopathy lactic acidosis and stroke-like episodes, Mitochondrial trifunctional protein deficiency, Myotonic dystrophy type 1, Neonatal stroke, Noonan syndromes 1 -, 2-, 3-, 4-, 5- and 6, Peripartum cardiomyopathy, Peters plus syndrome, PGM1-CDG, PHACE syndrome, Phospholamban Arg 14 Deletion, Postural orthostatic tachycardia syndrome, Primary carnitine deficiency, Progressive familial heart block (types 1A, 1B and 2), Pseudohypoaldosteronism type 2, Pulmonary arterial hypertension, Pulmonary atresia with intact ventricular septum, Pulmonary atresia with ventricular septal defect, Pulmonary valve stenosis, Pulmonary vein stenosis, Pulmonic stenosis, Renoprival hypertension, Retinal arterial macroaneurysm with supravalvular pulmonic stenosis, Right ventricle hypoplasia, Sarcoidosis, Sengers syndrome, Situs inversus, Sudden Arrhythmia Death Syndrome, Supravalvular aortic stenosis, Swyer syndrome, TANGO2-Related Metabolic Encephalopathy and Arrhythmias, TARP syndrome, Tetralogy of Fallot, Timothy syndrome, Tricuspid atresia, Vici syndrome, VLCAD deficiency and Williams syndrome.

100. The AAV vector of claim 96, wherein the subject with cardiomyopathy has an ischemic cardiomyopathy.

101. The AAV vector of claim 96, wherein the subject with cardiomyopathy has heart failure.

102. The AAV vector of claim 101, wherein the subject with heart failure has a classification of heart failure based upon a classification system used by the American Heart Association (AHA), the American College of Cardiology (ACC) or the New York Heart Association (NYHA).

103. The AAV vector of claim 102, wherein the subject with heart failure has a classification of a class III or above class III in the New York Heart Association (NYHA) classification system.

104. An AAV vector according to claims 45-64, a pharmaceutical formulation of any of claims 65-78, or a cell according any of claims 93-95 for use in the treatment of a patient having heart failure.

105. The AAV vector of claim 104, wherein the subject has a classification of congestive heart failure (CHF).

106. The AAV vector of claim 105, wherein the classification is based upon a classification system used by the American Heart Association (AHA), the American College of Cardiology (ACC) or the New York Heart Association (NYHA).

107. The AAV vector of claim 104, wherein the subject has non-ischemic heart failure or non-ischemic cardiomyopathy.

108. The AAV vector of claim 104, wherein the subject has ischemic heart failure or ischemic cardiomyopathy.

109. The AAV vector of claim 96 or 104, wherein the subject has reduced ejection fraction (rEF or HFrEF).

110. The AAV vector of claim 104, wherein the subject with heart failure has a cardiovascular disease or heart disease is selected from any of: congestive heart failure (CHF), left ventricular remodeling, peripheral arterial occlusive disease (PAOD), dilated cardiomyopathy (DCM) including idiopathic dilated cardiomyopathy (IDCM), coronary artery disease, ischemia, arrhythmia, myocardial infarction (MI), abnormal heart contractility, acute (decompensated) heart failure (AHF), abnormal Ca2+ metabolism, myocardial ischemia, atherosclerosis, cardiomyopathy, idiopathic cardiomyopathy, genetic disorder induced cardiomyopathy, cardiac arrhythmias, muscular dystrophy, muscle mass abnormality, muscle degeneration, infective myocarditis, drug- or toxin-induced muscle abnormalities, hypersensitivity myocarditis, an autoimmune endocarditis and congenital heart disease and pulmonary heart hypertension.

111. The AAV vector of claim 104, wherein the subject has one or more of:
a. non-ischemic heart failure;
b. non-ischemic cardiomyopathy
c. a classification of congestive heart failure (CHF) is based upon a classification system used by the American Heart Association (AH), the American College of Cardiology (ACC) or the New York Heart Association (NYHA); or
d. a reduced ejection fraction (rEFor HFrEF).

112. A method of expressing a phosphatase inhibitor (I-1) polypeptide in a subject with cardiomyopathy, the method comprising introducing into the subject with cardiomyopathy, at least one dose of the AAV vector according to any of claims 45-63,
wherein the subject with cardiomyopathy has a classification of heart failure,
wherein the at least one dose of the rAAV is selected from a total dose-range of about 10¹³ vg to about 10¹⁵ vg, and
wherein at least twelve months post-administration there is an improvement in the classification of heart failure.

113. The method of claim 112, wherein the classification of heart failure is based upon a classification system used by the American Heart Association (AH), the American College of Cardiology (ACC) or the New York Heart Association (NYHA).

114. The method of claim 112, wherein there is an improvement of classification of at least one level 12 months after administration of the rAAV.

115. The method of claim 112, wherein there is an improvement of classification of at least one level within six months after administration of the rAAV.

116. The method of claim 112, wherein twelve months post-administration there is an improvement of at least 2 levels in the classifications in any one or more of:
the American Heart Association (AH),
the American College of Cardiology (ACC), or
the New York Heart Association (NYHA).

117. The method of any of claims 112-116, further comprising administering an immune modulator concurrent with, or before, or after the administration of the at least one total dose of a rAAV vector.

118. The method of any of claims 112-116, further comprising administering a vasodilator concurrent with, and/or before, and/or after the administration of the at least one total dose of a rAAV vector.

119. The method of any of claims 112-118, wherein the subject has non-ischemic heart failure or non-ischemic cardiomyopathy.

120. The method of any of claims 112-119, wherein the subject with non-ischemic heart failure or non-ischemic cardiomyopathy is has a congenital cardiomyopathy or a genetic disorder with a cardiac manifestation.

121. The method of claim 120, wherein the subject with a congenital cardiomyopathy or a genetic disorder with a cardiac manifestation has a disease or disorder selected from the group consisting of: Arrhythmogenic right ventricular cardiomyopathy, Atrial myxoma, familial, Atrial septal defect ostium primum, Atrial septal defect sinus venosus, Barth syndrome, muscular dystrophy, Buerger disease, Cardioencephalomyopathy, Chromosome 1p36 deletion syndrome, Congenital generalized lipodystrophy type 4, Congenital heart block, Dilated cardiomyopathy, Duchenne muscular dystrophy (DMD), Fabry disease, Familial atrial fibrillation, Familial dilated cardiomyopathy, Familial hypertrophic cardiomyopathy, Familial progressive cardiac conduction defect, Familial thoracic aortic aneurysm and aortic dissection, Fibromuscular dysplasia, Friedreich ataxia, Gaucher disease, Glycogen storage disease (types 2, 3 or 4), His bundle tachycardia, Hurler syndrome, Hypoplastic left heart syndrome, Infantile histiocytoid cardiomyopathy, Intracranial arteriovenous malformation, Isobutyryl-CoA dehydrogenase deficiency, Kallikrein hypertension, Kawasaki disease, Kearns-Sayre syndrome, Left ventricular noncompaction, Limb-girdle muscular dystrophy (types 1B, 2E, 2F, 2M, 2C, 2D), Limited systemic sclerosis, Long QT syndrome 1, Lymphedema and cerebral arteriovenous anomaly, Lymphocytic vasculitis, Microcephaly-cardiomyopathy; Mitochondrial encephalomyopathy lactic acidosis and stroke-like episodes, Mitochondrial trifunctional protein deficiency, Myotonic dystrophy type 1, Neonatal stroke, Noonan syndromes 1 -, 2-, 3-, 4-, 5- and 6, Peripartum cardiomyopathy, Peters plus syndrome, PGM1-CDG, PHACE syndrome, Phospholamban Arg 14 Deletion, Postural orthostatic tachycardia syndrome, Primary carnitine deficiency, Progressive familial heart block (types 1A, 1B and 2), Pseudohypoaldosteronism type 2, Pulmonary arterial hypertension, Pulmonary atresia with intact ventricular septum, Pulmonary atresia with ventricular septal defect, Pulmonary valve stenosis, Pulmonary vein stenosis, Pulmonic stenosis, Renoprival hypertension, Retinal arterial macroaneurysm with supravalvular pulmonic stenosis, Right ventricle hypoplasia, Sarcoidosis, Sengers syndrome, Situs inversus, Sudden Arrhythmia Death Syndrome, Supravalvular aortic stenosis, Swyer syndrome, TANGO2-Related Metabolic Encephalopathy and Arrhythmias, TARP syndrome, Tetralogy of Fallot, Timothy syndrome, Tricuspid atresia, Vici syndrome, VLCAD deficiency and Williams syndrome.

122. The method of any of claims 111-117, wherein the subject with heart failure is an ischemic cardiomyopathy.

123. The method of any of claims 111-120, wherein the subject with heart failure has a cardiovascular disease or heart disease is selected from any of: congestive heart failure (CHF), left ventricular remodeling, peripheral arterial occlusive disease (PAOD), dilated cardiomyopathy (DCM) including idiopathic dilated cardiomyopathy (IDCM), coronary artery disease, ischemia, arrhythmia, myocardial infarction (MI), abnormal heart contractility, acute (decompensated) heart failure (AHF), abnormal Ca2+ metabolism, myocardial ischemia, atherosclerosis, cardiomyopathy, idiopathic cardiomyopathy, genetic disorder induced cardiomyopathy, cardiac arrhythmias, muscular dystrophy, muscle mass abnormality, muscle degeneration, infective myocarditis, drug- or toxin-induced muscle abnormalities, hypersensitivity myocarditis, an autoimmune endocarditis and congenital heart disease and pulmonary heart hypertension.

124. The method of any of claims 111-122, wherein the subject has reduced ejaculation fraction (rEFor HFrEF).

125. The method of any of claims 111-123, wherein the heart failure comprises ischemia, arrhythmia, myocardial infarction, abnormal heart contractibility, or abnormal Ca2+ metabolism.

126. The method of any of claims 111-124, wherein the administration is into the lumen of the coronary artery of the heart of the patient.

127. The method of any of claims 111-125, wherein the at least one dose is a total dose-range of about 10¹³ vg to about 10¹⁵ vg., administered in one dose or 2 to 5 sub-doses.

128. The method of any of claims 111-126, wherein the total dose is administered as any of the following administration methods:
a. over a period of time of about 20 minutes to about 30 minutes,
b. administered in a series of sub-doses, wherein each sub-dose is administered over a period of time of about 1 minute to about 5 minutes,
c. administered in a series of five sub-doses, each sub-dose is administered over a period of time of about1 minute to about 5 minutes, and wherein the five sub-doses are administered over a period of about 20 minutes to about 30 minutes.
